United States Patent Application Publication US 2014/0255922 A1 - sequence listing, part 4

SEQ ID NO: 12938 - DNA, 551 bp, Gossypium hirsutum
agacacaacagtcgtgtggccacctccaagtccctcatagcaccaaatcatctaaggctggggtttacctgtacagacagaaagaaagggtgagtttacgaaaactcagtgtgtaaccccctatcagtcgagcagtaaacagtgcatgtagtaatagtctgggcttgagccctattcagtatttgtatagtgtgggccttagccctatacagtaacagtgtgggcttaagcccaatacagtattagtacgtgcagtcatgtaacccaccctaatccaaccaacacaccatccgtaccaaccaacacaccatgtggggattaaatcgacccacccagttgacacaccaatattgcagcgaagctgctaataataacgtagctgtgacaaccctaaattgaccctagtcggaaagcagttttgggaccgctaaaccgaatcaccgaagtatttgaatataatatttattgtctaaaatatgtagatatgaatgtgtgaaagttttaagcttcgatttagtcgattgcatgtgaatttagttaataggacttag

SEQ ID NO: 12939 - DNA, 630 bp, Gossypium hirsutum
tatcggtacatttcaaaaagtatcatttttaataccctgagtattgatactcgtgacatggtatcaataccaaattgagttattgacttcctacacattcgaattaacccagaagggtcgatacatctgtactcagcaataaaaatcataccaaaacagggaaaatttcatacttaattaatttgctaatcttcatgcatcaacctccaccttattcaacgtccaatgaccatacatacaatccatagcacatcaatatagcaagtattcaaaccaaaacaataccaatgaaataattataacatccatcataagttctaaaacttaaaaactgaactcataaaatatcatgaggaccataataataataataataataaagtctaaccacattgccttattcccacagttcaaagaataatattaataccacttacacaaatactaaagcctaacttagatcactttattggaatttttgcaccgctcacactgcaacgctaaatatctacaatagtttagaaatgagtatgtaagcttaaacaagttcagtgaatgtcagagtgaccacaatgtatacataatatcaaaggttaaataagagctataacacattcacaaccatattct

SEQ ID NO: 12940 - DNA, 620 bp, Gossypium hirsutum
tttgttaatccgtagctaacgtcgacttggattcctcaaaaaagaaaggaaaggacaaagtcgtcgacgaatagctcaaagtttacggtttgtgtttctataatttgaaaatatttcaattgcagaaattatgaattgtatagcttggtaagatcataaggtgagttgaaattaatgaattgagctaaattgatttgaattgattttttgtttacagtaggggttaaattgaatagatttgagattattgtataatgatgtaaatgcgaaattgaatatgaacttagatgaattatattgatatatatatgtattgttgattggataatgaacatatgttattgaattgaggtattggcttatcaatggaattgagaaatagttagcctattaactatttgggcagggccgggtataattggcatgtcataggataggaagagtttagagcttttacgactacgtgtcaaggagtgctaggaacacctatttttcggttataccgaccagcgcaacttactattttggatttatctgatatgcattaagtgccaagctggtgtgattggttggatccgtgtatcctccgagtccgagtccgagtcaagtcaatagggagt

SEQ ID NO: 12941 - DNA, 658 bp, Gossypium hirsutum
ttggtagagatgtccatggtggtcccaggtcgggctgatgctcgatttttaaaaaaaattaggccctccgacttggtctgttcaaaaagtcaatattacaattttaaaaaataaaaaaaaatataattttatattaatatttatatatttttataattaaatttaaataaatcgtactcgtgaacaaaaattctttatccaaacttgatccaagtcggattaggcaagtcactcaattgatggcaccctacaaaatttcgcaatctctttaaataaatatttgataaaaaaattatattttggtatataactgaactttatagctcataaattggaaaaaaaaataaaaaaaaattgttataatttatcatttcagcctctctataaatggaatttttaagcttaatcaatagtattagaagtcagttttttttaatacgtttattgttggtgtacttgtcatcttctatttctgtctctaaattcaaagttttcactataacaaatagaataaagtctctcattaattgataattcctttccttttaccattaggagtttttattaaatttccttttctaaactaagagattaagttgttgatgactatgatgtagtattatagtgattatatgaatgcatgaaaccatgatgctac

SEQ ID NO: 12942 - DNA, 645 bp, Gossypium hirsutum
ttgggttgtatcctgacttctcggcatttcttttcttcaagtaaccctattctatcccattgcgtcttcaggggtataataaatagtgctttaatctactccactggaattttagggagaagagatttgtatcttcaatgagataaaagctgatgatttcaacctactccgctgcaacttcagggagataaggttagtgacttcaatctgctcctttactactgtaacatatcgaaatagggcctaaatggaatagtggttgcgaaaccacaaatatgagatagaaaaatttattttattatcattttaaggtctatggcatgattgcatgattgtgtgaaaatttcgtttagaaattttatcgatagagggtccaatttgatatttaggactatactgcaaaagttgtaaaatgtgtgttctagttcacaaaggtattaagtacttgtgagtaatgggtttttaaagtggaggtccttggatagcaattataccattatactagtttggaaaaaaatacctaaagaaaaataaaacaccatagcttttaattaagggcattttggttatttagttattaaaatgaattaaaaacaaaattaaaagccaatttttgttcatcttcttcattagcccgaaatttcc

SEQ ID NO: 12943 - DNA, 753 bp, Gossypium hirsutum
  misc_feature (645)..(645): n is a, c, g, or t
  misc_feature (707)..(707): n is a, c, g, or t
agccaacctagaaacgtgcaaagaccccgcctaaaaaacaggccccacctacccaaggcatatagagataaagcattatcccactgctttaacaattcattttcactgaaatcaaaaaagtaattttgggactacaaatttatagttaaaaaatttattttattattattttattgcctatagcatgatagtaatatagtataaaaatttcgttaagaaattttactgtttacatgctcaatttgataaaaaaagattaaatcgtgtcaagtgcaaaagttgagttctaattgctaaaggtattaaatagctatagaactttaaagtggaagtccttatatggtaattagaccattagagttgatagtggattttaatggcttggcattattgaaatttggataaatttttaaggttaattttagtaactagtaattaaagttaaaattaattaaaataaaataagccaacatcttttctttcatcactcacaaccaaaattagaagagaaataagcttaacattcagccattcttgttgcttgattaggtatgcatttttatcccgtttttaatgatatctacgttttcgggatcgttgtagtttaatctagctagtctgaggactaatttgtgaaactgaaangatcccgaaaacgtagatatcattaaaaacgggataaaaatgcatacctaatcaagcaacangaatggctgaatgttaagcttatttatcttctaattttggttgtga

SEQ ID NO: 12944 - DNA, 621 bp, Gossypium hirsutum
  misc_feature (57)..(59): n is a, c, g, or t
gaacggaggtaataaatcaaatttgatgcaaaatcaatctatcttcatcacccatgnnngacgaccatcctataaagcataagaaaaaaaagaaaaaaacatttttctcgaaaccctgcatggaatccgggtatagcataagatcaaacactgatgatactaaaagggttgacctatgtgtgtatgtctatgtttatcaatattaaaaaacaaacaatatttttggcttaccaaaaaaaaggaaaaaaagggaaaaaaccaaacccggaacagatatcctccactccaagtgggaaaaacccgggggtaaaacccccctgaaagttgcaaaaaaacaaaaaaaaaaaaaaaaaccattgattttaaggaaataaaagggaaagtttattaaaaagataaaaataaataaataaataaaagggaagcaaaggaaacaaataacaagcacaagaatatgaaaagaaacgaaaggaagaaaaagatggggggatggggggatagatataaaagtcttaagtaattaatagatacagtaaatgaataataaaaatattttaatgatgaaaaaggaaagcaaaataaaaatatttaattagctaaggttttttactgtggtcgaca

SEQ ID NO: 12945 - DNA, 635 bp, Gossypium hirsutum
ttgccagccgttcaataattgtaacattataatgattcctatatgtaaaataagaggtttgtcattctacatgaaggtgagagcataaagcagatgcagaaaatgtaacctaaataattgaaagaatgcttggaggagttgcttcttactgacagaacatatacacacgggtaactaaaatgaaaaacggaaaatttaaaaaaaaaaatctttcatgatcaagttagctagtaagtaatatcaaatgcaaaagaagttagataaggtactaattcgatctagcaaaattatcaagcacaattagaatgaaaaacagataaagaacacaaaaaccaagaccatgagtgcttaattgtctctacaacttcaagaaaataaaaggtaactacataacgttcgacaacatctagatacaacctagttatagaaagaggcacactgtcactttttcaaaagcaaataaataattagtaataatagaaaaaggataacaaatatccacaaattacttttcatgagtcagaaataccttgaaaaactctaatgccattgacatctcctgccaaatatctcccaaaccatcatctatgttctcagttaaagtatctacatcttcttcgactccaacataaaca

SEQ ID NO: 12946 - DNA, 694 bp, Gossypium hirsutum
gttcagtgcttaccctggtttcctcatttttcctcggtgggttcgcttatccagtagtggttaatttgcgtttggtcatctagccgttagctctgtgccagttccagcaatccgctgtttgctttctagcgctattgtttttgcaaggagtggagtggttcatttggttggtgcctggagttctttcatagaagatacattggtcacaagttggccattgggatgcacatgatgcatgcaaataacatctggctgctcggtagttgaaccgtgggctgctactatttgtagctagcctgggtcttgatttggcagcatatcaaagcattagaagctgcactttcgcatatcacaggattgtttgtaaactcaagcctatgatgactcgggaagcatttaatgatacttatattattatttttcatagccagaaagcatatacatttcagaatggcaagtatgattatatatagattgatatacagtcatgctagttttatatatatacaggcaattatgatgccctacactgaagcaatcacctaacatgaacatcataaggaacaaatacagggtctggaacaataagcggcaatttatcaatgtacatgaagagcctattagaattctctctcaatatcagtgacaaatcaacgatctcgctcttctcggtgtaaatccaaagggtcacatg

SEQ ID NO: 12947 - DNA, 606 bp, Gossypium hirsutum
  misc_feature (6)..(6): n is a, c, g, or t
ttttangtctcaaatggttgccaaagagtactcaaatggacaccctttagtcctatcgtgaaggctaatacagtaagcatcatatttattcttgttgtcatacaacgttgagaggtacaacagggtggacgtcaaaatatcttcacacatttatatacaattttgcaaactacaaaaagcttctaatgggctcaaacaagcacctcatattaggggttagattgattgatccgtacactgttacaaaccagttgaattaattttttctattttataataacttattcaattgaattagacaacttaattagattaatcgaatcgagagttgatgctctgatcagttcaagcagacaaacaatggctcatgtttgttctttgctatgcatgtggtttaggggaatgttgaattttctctttttaaggctacttcttgatattggagatgactcgcaagtatctattggatgcttaaaataggattgctagatgaaaatcctgtacttcttacaccaacggctagctttctaccattgtcatcattgttaggtgttcccattgaggatatgctataggcattagcatagttggagccttgcggtacat

SEQ ID NO: 12948 - DNA, 525 bp, Gossypium hirsutum
agatcttcaaacccacaacaacaaaacaatgctgggtaacaaatatcagtctggctacaaaatcaaagtgctttaaattggaattttatattttgtacaaaatacaatggttccccgctcataaatcaactaacacaaaatgaactcttacaatttgcataggttaaatagcttccaagaaaaattcattattacacactagatttcaatatactagcaatatatttatgaacatgtttattattcaaaagtgacttgataactttagaccaaatacattacacgattacagaaaacctaggctgctcagactcttcattttgtttaagtacttgtgtatgtcaccatgtttaacgcataataggatatggatatgaaaatatgatcatccgaagatcctcccaagtacatacaaaaacttggcaaataacatttccgtgtttgacacatatggtatccgactctcaacgccaagtccgattatcatagcacaatacattacgatacagggggaaaaaagcacta

SEQ ID NO: 12949 - DNA, 645 bp, Gossypium hirsutum
acttccttccatattgtttccatcatctttttgtaaatgcatcatttctattgttgtcaattccttaatcacctctctcacatctccttttactcgaagatccaacattgtgcccatttctcatgtttttattttttgttttaatagaagtaagaatagatcttctattgtattaattgacctcccaatgatacgatttatcatgttttggctttattttgatgcgcacatcatcaactttatgattcattattggtaaaagtattatgaaagtcgtattacattttgttttctctactaaaaaattgagtaaattagtacctatatacattaaatcaaagagtaaattaatccttctattaaaaattcaattcatttctactgttaaaaaacttgtccctatacattagcatgatgtgcaaatgatacgtcatgtatcattatcgggttattccgttggccaagtcactttttaacaatacaaatgggtgaagtttttatacataaagaactgatttgctctttcatttaacatataaagactaatttatttattttttaaatagaaaatagaaaatataatttaacttttagtataaatcctctatgatatttttagtttcattatttcaatatccacgcatg

SEQ ID NO: 12950 - DNA, 680 bp, Gossypium hirsutum
cgacctccccttggaactttattccggtgacgacggctctgatgttttgttctttgtgtttgcttgtggcttgttgaggctgggttctgctctatcgtaagcctgtgagcttttatgttgtagtaatataatttatttggtaaaaaaacgtggttatcaactcgtttaatgattttaagtttttaataatttattatgtctgtcactatttataagtttaaaaaaacatctaaaataagtaacacagtaagacaatggtttttgtggaaatacagaccaattcccctcaacatcagtcacataaagcactcatcttattgctttatcggtcacttcccaacaagcattaccagtctccatggcaacccaatctcaatttggttgcttcttccctaattaaaccaagaccagtgatgacaaatatgaagatgaaatgaaactaggatgctaattaattaaagctttagaaatggagattttttactggtcaagaaattgattcgtgtatctccaaatgaaacgaaacatggagtcgccaccaatcttttttgtttaggtgtgatcgggtcacctaagaattgggttattttaataaaacatttttttatttactaaaacaacgattttggtctacgaactttgagaaagcaggttcgggagtcggttacgtatgaggaaag

SEQ ID NO: 12951 - DNA, 635 bp, Gossypium hirsutum
aagctagacagaaaacaaactaataaaagaaagaaagctcacttcattatagatctccaggtatgaaacacggagaagaaactcccgatttggtgtctaaagcataaggagctcattagtatccataaaaagtagaaaaatagaaactacataagtcaacatctcatgtgagtacctcctgaataatgctaaaagcatcttttaccgccaatggtatgattccaggggacctctgatcaccctgccatttcagccattaagaacatattagcatgctatttgtattttaaaatataaaacatagattatacggaacacaaattccagaccaaagcataccatctattataatggtgcatgtagaaattgcacaatttttgtttaaaagaatccgtgcttgaagttttaaagattttgcatatactccacaaaaaaaacatgattatttggtttagagtttccatttgcagatatatttgacagatatgatgatgaatggtaataaaccatacaccttaatatcacgtaattaccgtccttgctaaaagcagtatatgttatatataggcactaaaagccaacatacaatgtttttgattatatagtttagaacatactagaggaacacacttctc

SEQ ID NO: 12952 - DNA, 566 bp, Gossypium hirsutum
  misc_feature (9)..(9): n is a, c, g, or t
gtctccacnagtcataacctaaaattattagattttaataaaaaatatttaaactttattaaaaattagaaaaaaaaatgtaaaattttataaaatcataaaaattgtaaaatatataaaaatataaaaattataaaattttataaagtcatacaaaattataaaaaatgaaaagaaatatacaattcgtaaaagaattataaaaattattgtaccaaaagaagtattttataatttttctataatttttattgatttttattttttatcattttttatcacatgtcacgttgtattgtgatatgtgatggctttaactgaaaaaaattgggggtcattaactttaacagtcaacggttaaagttaatagttaaatggcttttttgatgcattttataacttttctatgatttttataaatcttacaatttttttatattttttacgatttttataaattttttatattttattaacatttaataatttttattgattttattttttataatttttatcacatgtgacgctgggattatgatacgggagacagttaactttaaccg

SEQ ID NO: 12953 - DNA, 655 bp, Gossypium hirsutum
cccgaccttagcatagtttagcttctctagaacattctaattttgagttgactattgggttctattttctaatattaaaattcacaccgaactcatattgaatatttcgcataaataatttttaaaattttttacctgaatgattataaattaaatgataaatatatatgtttatttttttcttattttatttttaaattcatactaaatagaaattcacccactatgatcaaattcgatataaatgaaataatatttctctataattttaaaatatcatatattcaagttagtctaagcacgttttagggtttttttctgttctaccgataaaagaagtttttttgttcaaataattttaaggtttcaaatcataccaaaagaaattatttatcaaaacaaagacgttggaagatgatccaacaaaactcgatattgctggtgaggtggaagaaacagtttaggggcaagatgatgatgatgatgaaagcaaagaagaatacaatttttgtccggcgggaagagtattaacatataatgccatacactttccttcaataagtataaataataggattcgttaatttattggttaatgtaaatgcaacattgagtaaaaataataggattccctaactcacctcgaactcgaaat

SEQ ID NO: 12954 - DNA, 504 bp, Gossypium hirsutum
  misc_feature (94)..(94): n is a, c, g, or t
  misc_feature (105)..(105): n is a, c, g, or t
  misc_feature (339)..(339): n is a, c, g, or t
  misc_feature (342)..(342): n is a, c, g, or t
cttgatccattaaaatacatgatggagtcaacggctctaaatgggagaatggcgagatggcaaattttgctttcagagtttgatatagtctacntaagtcagaangctataaaaggaagtgcggtagcagactttttggccagtagggctctggaggattatgagccattgaactttgattttccaaatgaggagttaatgtgtatagcaaccactgaagattctccttggaagctaaattttgatggggcttctaatgcagtcggaaatggaattggggcagtcttggtatccccgaatggcgatcattacccgttcacgtgcaagttggactttgantgnacaaacaatatggctgagtatgaagcatgcatcatgggacttcaagcagctatagagcgaggtataaaaaccctagaagtatatggagattctgcgttggtaatttatcagcttagaggtgaatgggagacaagggaccctaaattgatcaattatcgaaag

SEQ ID NO: 12955 - DNA, 594 bp, Gossypium hirsutum
tttatactatttgcaaatttgaaatttagtccatttatttcaatctataataatttaattcctctactttttgcttatatagctccatgtgattataaattgaccatgtgaataatttttttaaatttaaaaatgacgcataattcaatttaacaaaaggtttttttagcagtattatcaattggattctcagttattacatcacaagaatagagaaattacattcctaaaattaaaaataaaaggactaaattttaaatgtataagaaataaaaggactaggacttgaaattataccagaagcattaacattcgctttgaaactaagcttgagctggcaaagattggtacgttttcaaagattacaaatttcaaaaagaaaaaaagattgtctaaaaacatctcttaatttcttttgttcacatgatagtaaatgggcccatgtaataagaatcaacggtaaagatgctataaaagagaggtaaaagtaatcaaatctaacggtagtgagagtcgcgttgatttaaagccaatatggcctaagcgctaagacccctgaaaaaaccctcttatataaaccctagctattgccgc

SEQ ID NO: 12956 - DNA, 612 bp, Gossypium hirsutum
cgacaatgaataaaagttgcgtttttttaggggggaagttgaaattctatctaaatacaagtgctatttgcatgccttcaagtgaatttcaatcgtattttttgagatttagatatttttttccgaatattatcttgaatttcacattaaatttgaatcaatccattttaaatttttttttattttgatttgaatttttagaaacaaaagttatattttcatctggatgtctgcttatatattgaaagtatataattctttcaacaggtacacgggaaaacgtctgtcaaataatacagccataaagtaaaaacaaagacatcaaggtagaaaaggccacccctcaaaagacaatcaccaacagcaaacactcacaaaatagagaggatgtcatggccaggctcgacaccagccttggccaaactgtctgcttccccattcaccgatctcggcacatgcgaaattaaccatctctcatcgctaaccagcctcgtaaatgagagaataagctctttgagaacactcagggctctgctaagactttgaaaccattccactgcaaccttgctgtcagactcgatgataagtttatgggacatacaccaactcgaa

SEQ ID NO: 12957 - DNA, 653 bp, Gossypium hirsutum
  misc_feature (18)..(20): n is a, c, g, or t
aaatttgggtaattctcnnntggagtatttagaaatttggtttaagagggtcatagatgaattataaatttttgagagttttatcattatattaatatgtaaatgacaaatccaccatttgaaggaagggcaaggaaactttttgttcccttttgcctttgactctccgtgttgatatgtctctaccgtgtatataaatactaaccctctaattgtacaatataaaaaaaaacacatgaacatttaaacacaatatcgaaatggataaatttagtcattgtactattaaaaaggaatcaaatgagttaaacatttattgtttaatagaatcacattttatgattctgcagattttacgtggaaaaacaaccatacaagaggttttcgactacacacatttagagggttcaacttgtgcggatcccctattttgcctttctttttttatttctttaacaagtgcgttgcgcttcgaatttttcaagtcggatcaaatgaaatttaggtcacacaactctaacgtctcactaatagtttcatggggttcaaccttggacacttctctctgagtggatatttttgaactgatcacaatgattctaatatcagaaaccatagttactatgcaacccattttgagggagaagtgttag

SEQ ID NO: 12958 - DNA, 649 bp, Gossypium hirsutum
ataaaggttaatttggtaaaatggttattaatattagaattaaagaaaaaacaaaacaaaatttggagtgttcatcttttactccatcgatattttgaagcttagaaagccaaagttagggcttttacattcaaccaagcttagatcctcaattaaggtacaatttttattccgtttttaatgatttttacgtttttgagctcgttgcagctcaatctagctagcccatgctttaatttctgaaattattgatgattttgagttaagccattgttgaatatttggttgtttagatgtttaatggtaaaatattgatggttgttaatagatatacaagttttataaagtgatttttgacaaaaatgtaaaaaaaaaggattaatttgtaaaagatagaaaaatggtggtttgaaatgtgaataaaatgaaaatatgggctgctatgaggttaagtgaaattctgctataacgggttttggtttaattgtgtaaaagtaccattttatgtgaaaaggactaaattgcatagtagttaaaagtatagggacaaatgtgtaatttgccaaatatttgtgaattgggctaaattgaattgaataattactgacaatattgaattgatattatatagatcaggataagcaaatat

SEQ ID NO: 12959 - DNA, 799 bp, Gossypium hirsutum
  misc_feature (478)..(489): n is a, c, g, or t
  misc_feature (491)..(494): n is a, c, g, or t
  misc_feature (501)..(504): n is a, c, g, or t
  misc_feature (527)..(531): n is a, c, g, or t
  misc_feature (535)..(535): n is a, c, g, or t
  misc_feature (540)..(545): n is a, c, g, or t
  misc_feature (554)..(554): n is a, c, g, or t
  misc_feature (564)..(574): n is a, c, g, or t
  misc_feature (578)..(578): n is a, c, g, or t
  misc_feature (581)..(584): n is a, c, g, or t
  misc_feature (586)..(587): n is a, c, g, or t
  misc_feature (590)..(594): n is a, c, g, or t
  misc_feature (597)..(599): n is a, c, g, or t
  misc_feature (601)..(602): n is a, c, g, or t
  misc_feature (604)..(631): n is a, c, g, or t
  misc_feature (638)..(639): n is a, c, g, or t
  misc_feature (641)..(643): n is a, c, g, or t
  misc_feature (645)..(647): n is a, c, g, or t
  misc_feature (651)..(655): n is a, c, g, or t
  misc_feature (657)..(657): n is a, c, g, or t
  misc_feature (664)..(678): n is a, c, g, or t
  misc_feature (680)..(687): n is a, c, g, or t
  misc_feature (691)..(709): n is a, c, g, or t
  misc_feature (711)..(717): n is a, c, g, or t
  misc_feature (719)..(719): n is a, c, g, or t
  misc_feature (721)..(721): n is a, c, g, or t
  misc_feature (724)..(729): n is a, c, g, or t
  misc_feature (731)..(734): n is a, c, g, or t
  misc_feature (745)..(746): n is a, c, g, or t
  misc_feature (749)..(749): n is a, c, g, or t
  misc_feature (752)..(752): n is a, c, g, or t
  misc_feature (754)..(765): n is a, c, g, or t
  misc_feature (768)..(770): n is a, c, g, or t
  misc_feature (772)..(795): n is a, c, g, or t
atgatccggaacctaatttgagtagaataaatgagttttttagtattccaaagtgaaagcgatgagggaggaagaatgatattaacagccatatagcgagtagttggagtttctagttttatagtttctaactctagctggcaaagcaaatctttaaggacttaagaagttaacacgtggacatgatggacgtggcgttctctgaaccagaggataagtcttaattgatttgtatcatcgtcgcctctgccagtcgttggagagcagaacagaacaacaggttacattacaatggttgaattacctagttgataccggggtgaattcacaaaaagaaaatttaacatcagaattaaattatatacgtttatgataagtaaaattataattataatttttataatttatatctttataatttttaaaatgttttatccgtctctttagatatgttcttggaggaatttagtgaggtatnnnnnnnnnnnngnnnnagttgtnnnnagggtgggggtggcggtgggggnnnnngtcnattgnnnnnncgctggtgncggcgagggnnnnnnnnnnnatanccnnnngnnccnnnnnttnnngnntnnnnnnnnnnnnnnnnnnnnnnnnnnnntttacgnnannnannnttannnnntnatctttnnnnnnnnnnnnnnnannnnnnnnatgnnnnnnnnnnnnnnnnnnngnnnnnnncntntannnnnntnnnnacccctttttnnttnccntnnnnnnnnnnnntgnnntnnnnnnnnnnnnnnnnnnnnnnnnctcc

SEQ ID NO: 12960 - DNA, 530 bp, Gossypium hirsutum
aatcttcaagtctttagacagaagctgcagaactaaagtcaagataggaaatggacattttattcaagctgaaggcaagggtgatgtgctgatatgcacccccacaggtgccaaagtgatttcaaatgtgcttttggtgcctgaaattgacagaaacctgctcagcatagctcagttgctggagaaaggttattctgttgtgttcaaagacaaccaatgccaaatcaatgatccaagtggatccaagctgatggcagttcctatggctaataagagctttgtagttgactggaccagggagtcagacattgcctacacagtcacatcagatgaatccaagctttggcatcaaagactgggacatgccaacttcagatcgatggctcgaatggtcagagaggacttggctgaaaacttcatcaactcagtggatcatgatgatgtgtgtgaagtgtgtcagctaggaaagcaggccagactcccatttccctcgaatcaagcctggagagcctctgaaaaactccaactgg

SEQ ID NO: 12961 - DNA, 560 bp, Gossypium hirsutum
tggtttaaacaggtccctaggaggtttccaatgattaatatacaagaattaaatccatcattttaaaccagtaataaataattagattcgtggttaagggttgctgggattaatgtttaagcatggttccaaattgaaccaagtgtacagtacccgtccaactcttgcttgcatttaacttcaataataaattcgtcttttcttaggaataaactttgtatttttaagattcagtttgttccattattatataaactggtgacactgtcacaaatagaccaacccaacctattttataattcaaaatttacttcatttgtcatcacaagcagggtaatgtcatttgaattttaaatttttatagttatatataaaataatataatattaagctaaaatgaatatttaatatcaaaataaaaatattttatatttaattttcctaattcaatcatctgatttaatacatgataaatttttttattaataattttatctttgagttgatttttatattaattttgacagctattttaacccactattcattcttggattagg

SEQ ID NO: 12962 - DNA, 547 bp, Gossypium hirsutum
gaaggtttgattccaaggaccactcagacagtgtgcttggtattagagttaaatagaaagagtagcaattattaatggcagcctcacgtgtttctcctgcttagagatagaatctccttggatcagaaactgccccttatttctccctttctcctcctgctttcctctctgccaccgagtctaatctgggataaaacttgacttaatcattcaactcgttttatttacatatatatatatatattttatcacaagcattaaaattaaaattacaattatatttaattacacactttaatttttaatatatagttgtagattttatgaataattaaaatatataaatatttgaatacttagtacagtaaaaatatgaatagctagtaaataagatcatatcacaaaactaaaaataaaataaaaaacttcatatttatttatttttaaaagcttttaaataaatacgtcacataatctatttaataaagaatggtttaaatctatcatagctccctatactcttcccaaaaatactcttcccaaaatc

SEQ ID NO: 12963 - DNA, 635 bp, Gossypium hirsutum
ttgcccactcctttggttgctattaatagaaagtgcaaatttcatatttatataaatacttacaaatttaccacgacaggcaaacaagatgtatactcacctctcctgatgaattcaaattgctgtaatgatgatctgagaaatcatccacaatatcaaaatgtttgaaactgagagaattttgcacgactccattttcttcatttccttctttccgatcagaccctgactctcttaagaccattgaagtattggtagaaaccgacttcagttcgctatcagccaaatttgatgttgtcgctttcttgctttcagccagacatggggttgttgagagtgagacacccacggcaggaggtagatttccaagtggagcagagcctttcagccaaggaattgaagcctctaccccaggaggaagatccacattatcaaaatgggattgcataattgcataatcatcttcatataaaaaatcatcattgtcaccataatcagaaacatcatcagcatagtcatcacaatcctcatcatcatcaggatatgacaaatcagagttagaactattgatattattcgaattgattgatgcagaagtagaactcttgaagggattgtcactatcctcagaccct

SEQ ID NO: 12964 - DNA, 680 bp, Gossypium hirsutum
  misc_feature (661)..(671): n is a, c, g, or t
  misc_feature (673)..(676): n is a, c, g, or t
atttggcctcttacaaacaagtggaatagatcaaacaatgttgaaacaacattattatatttcaacaattgcgctcatctttatttcattccaattcattaaaatcctccatgtattccttgaacgaatgtacaatctaggaatcataaaaaaaggacatgaaaggatcataagacataaaaatcaaaatatttaagtaccaaccatttctgtctgcttattgatgttcaggtaaaataatccaagttcaaaatttgctgaaaaagaaagtacaaacatttctggccaatatatatatatagtatgatctttacctgtaacccagagaattaataaaagaaatgaatattaatggtcgtatcagtttatagtttgcgagagatgaaataaactgcccgtcaaagaaattaaagggatgacagacaagctctactttatgcaagttctgatacgcacataattctacatgtacatgacactcttacctgtatgtttttgcaaatctcagatcctctgctagactcaggatctccatgaatactaacaggatttgtaagctattggttctgtagccttcctaaataaggatccaaaacatcgtttaccatattttttactatgctaaacaacgtatcctctgtgattaattgctgcaaaatannnnnnnnnnngnnnnggag

SEQ ID NO: 12965 - DNA, 567 bp, Gossypium hirsutum
caaattcaaggtatcgcgctagtaaaataagataataacaaacaactaagttttagagataagggttcattgagtaccatctcactaccacccttacacttatttaaattgatgcccctatagacagattcaaatctaaaatttcggccaatgaaacctgggttgtgtaaatcatgtgagttttcttccatatttattctaattagttggtaactagagttgagttagttatttaattcaatgcttgtaatgattgattctaattggaagcgttgatatagttgtaaattcaaaaaataataaataaaaaaaactaaagttacttaatgaaacaatataagaggggaaagaactcacttgttcatggccccttatcttcataaaaccccgcagaaattcccgtttgtagtggcaatcaccacttagatggccagcacgaatctgcaataatagaagaaaaaaagttaaaacatctacttaccaaatgtactgagagaacccaaatacaaggagaaaccacgtgcaggacattaaacaaagttcagtttgacaaacctcactacaggc

SEQ ID NO: 12966 - DNA, 634 bp, Gossypium hirsutum
aaggtaacccatagtgagggcgccttcttattaagtctttatacttctccaatgcatcatataaagtttctaaatccatctgcaaaaaataagagatatcattcctcaatttggctatcttatcttgtggaaagtactttactagaaacttctcggtcatctgttcccaagtagtgattgaacctcgtggtagggagttcaactacttcttagccttatttcttaacgagaagggaaatagccttaggcgaatggcatcgttagaaatgccgttgatcttgaaagtttcgcaatattccaaaaagttggccaaatgagtatttggatcctcatcttgcaaaccatctaactgaataaactactggatcatctgaattgtatttggcttcagttcaaaattgtttgcagtaacggtaggtcgaataatactcgattcagccctagtgagattgggcttagcataatcgtacataggacacggagcaggattctgatttacaggagctacgacaatcacaggaggtagtggattattttgattttaatccatctcctcgatagtattagtaacgtccttgtactcttcctctgtaagctcggccttatttctctactatttttaggagctgtgctt

SEQ ID NO: 12967 - DNA, 538 bp, Gossypium hirsutum
  misc_feature (483)..(483): n is a, c, g, or t
  misc_feature (517)..(520): n is a, c, g, or t
actctctctcttgcagacccccaattgcaccttcacttcctttttcttcctctcaatccaattttttaggtaccggtagcaccatttctttgttgaacaaagcaaaatctcagaccaaatctgtttcatttgttgttggtcgaccaaggtgggggacaacagccgagcctgctaaaaagggtcttacttgcaatgctttgtttggtcttggtgtgcctgaactcgttgttattgctggagtggctgctcttctgtttggaccaaagaagttgcctgaagttgggaagagtattgggaaaactgtcaagagttttcaacaggtttgtttattccttatctgggttttgcttgatatgtcaaaaactcaaggaaaatgatcgagaatttgaatcctttttgttttgttcaaaaaaaaaatttggttcttttgttattgaattgttgtgaaaagggaggttttggggttttccactgaaaaatttnagaaaaacaaaacaaatcttctattctcaacaannnntatttattctttatcgaa

SEQ ID NO: 12968 - DNA, 701 bp, Gossypium hirsutum
  misc_feature (650)..(665): n is a, c, g, or t
  misc_feature (668)..(680): n is a, c, g, or t
  misc_feature (685)..(686): n is a, c, g, or t
  misc_feature (688)..(691): n is a, c, g, or t
  misc_feature (696)..(698): n is a, c, g, or t
aactccctatactttttataaatttcaaatttaagtcttatactttatttttaagaattttagtttctctataaaacaaatttgagatttaggcctagtccaattatttatattgttgatatcttctataaaaaaaaaatcaaattggcatacaatatgattgataaaaaaaggttaaaatatatgtcaagtccctttactctatgtacatttgaaatttagtccttttatttttcagattccgaaattcaagttcaattattaacattgctaaaatcttttgtaaattcacaaatgtgacatttggaaataaaaatactcaattggttgctacgtaacaaaaaattatgttataatgaatctaaatttaacaaaaggattttaacgatgtgaacatttgaagttacatttttaaattaaaaaagtagagagactaaattctttgaaataaaagtaatgggaagtatatagactcggagtatatttaaactaaaatgataaatatggtaagtttgaccatttttatgaaaaaaataattttagtaattaatttttaaatccaataaataaaaatatttgatttttaattttttaaaatataaaaactaaatagcaagttttattaaagtagatggactgacggcaaaatnnnnnnnnnnnnnnnnttnnnnnnnnnnnnnccctnntnnnnttttnnnttt

SEQ ID NO: 12969 - DNA, 637 bp, Gossypium hirsutum
ttagtaagctgctaagatcactactcgaaaagtttgcattctaagtcataataattgaaaaagctaaagatatcaatgtgttgattgggttctttaaactttcgaaatgaatttggaagagaataaaagtgagaaagacaaagcaaataaaaaagttgctttcaaagttaaagacattattgaaaatgttggcaattccattccatcttttgaagaaccgaaagaaaaacttgcagtcctcactgaaaacttcaacaaagccattcaaaatagaaaattgtaaaatgatgcagttcgatcaacaaccaggagaaaggcaaaacaaagttggtagaagaaaaataacacgacaggcaaaaaacgatccgatgccatgaattaaaggctataggcataaccatgcaaagtgctaaaaagaagaagaaatcttaatgtaacctagagtaatgaggatttgtaagagcttgttatgctaaaacctctcaaacaaaaaaagttggaatgaacaattgttttcaactaccgattgaaaatgaaatatgtggaataggaataacatatctgatcacgcttgctaaaaaactactccctttaccatatattttcaaagctaacaagggtggcaagatttcaatag

SEQ ID NO: 12970 - DNA, 605 bp, Gossypium hirsutum
gatgatccgactttcccggccaccctcgttttcagtcggttgtgaaactcaaacgtatattttagttttaccggcatagctattatcgtaatggacagagtagagataaacacggttttcgaaatgtttgacaagaatggagatggacaaatttcaaggaaagagataagcgagtgcagaactttggtatctatatccccgaagaagatttatctcaaatgattgaaaaggttgatctcaacggcgataattgtgttgatattgatgagttcagtgaattatatcgatcccttatgggtgataaggatgaaaaggaagatatgaaggaagcattcaatgtttttgaccagaatggagatgggtatatttctgttgatgaattgagatttgttttggtttcacttggacaacaagagcgaactgttgatgattgcaagaggatgataacgaaagtggatgtggatgttgacggtagggtcaattttatggaattcatgcaaatgatgaaaggaggtggcggtttcagtgctttggtttatagacattcttccacaaatcaatattgatgtgggcaatcaaaataatcttttaattttgcctcttag

SEQ ID NO: 12971 - DNA, 637 bp, Gossypium hirsutum
atcagatgagataggttagagctaaatcttatgtacaacgcatcatattttattaaaaccttagaatttaagtgaatggacgtgtataatgttagaaaattgatgaaattatctagttacgaaatagactcaacaagagacgccataacatgcaatttaatgaatttattttgaattaaaaaaaaagtgttcggttttttgtaatatttatattatttgctctcatatatctactttaattttatttgttatttttttataaatcaagtttatatatatgaaatatatcgtattattaaccagtataagtatcatttaagtatatattctattttacaacatcatatctaaaatggtcaactgaggtttcacttggttggcatcaatattgttatgaatacaggagcacgtgggtttcaatgcgttaaaacatatttatcctcttatttaaaagttaagaaggattatgagtagttctaaactttatatcttaacaaaaaatcatatctaaaataaaaattttatttctcaaaaacattctttgacagcaatggtaaacactagaggtgctcatgggttaggccgggccgggtttgggttgggctcaactaaaaattcaaactcatttattggggct

SEQ ID NO: 12972 - DNA, 676 bp, Gossypium hirsutum
  misc_feature (671)..(671): n is a, c, g, or t
gacatgttccatttgcaaacctttaaatccctttcaattttatgtagctaactaaattataatacttcagacaataatagcttgaaagaaagaactaaacctacccattatgaaaaaaggaaaaatattagcctccatttttttaaatatttttaatagataatcatatgtgaaaagggattagttttttgagtaaaatatttaaaatttaataagttaatttttttatataatgcttaaaattatttatattttcttaatctttaaataagaagataaaactcatttaagcgtgcttaaacttacatcctcctataatggtaacattaaagatgataattaaactaagactcaattaacaacaacaccgaaaattttatttcattgtttaaaattttaattttttatagaataaagaacataaaaataaacttagatgcacacaaatgaatcatgcttatatagatttctcaaattacagatcagaggcagagattatacagcagacatgctctcgaatgttacacatgcaatatcagcatttcaaatttaatatttcacatgcaggcactaatcaaataacaaatgtatttatatatcataatatcgtacatatcaagcatactatcacactattagaaataacattaacaaaggcaaagtatcagatntcatg

SEQ ID NO: 12973 - DNA, 652 bp, Gossypium hirsutum
  misc_feature (643)..(645): n is a, c, g, or t
ggaggactcttggaacccgaaggacgcgaattggaactttgtttggaaaattccagggccacaatgtgttagacaatttatctggttagtcctcaagcagtgacttttaactaattcagaaagggttagaaggggtgttgcgtaggacgcttcgtgtcagctctgtggtcattctatagaggatatccttcatactcttagggattgctcttttgcaagggaaatttggaaccaagttattcctcccaatcattttgacagattctttgctggtaacatttcagagtggttgttctcgaatttgctttcctctctttcacttagcacaagggattcagcttggacctgtctttttgagattctcctttggcgcatttggaagaatcagaatacgttcatttttcaagggcattccatgagtcctaatgacattattaatatctcttatagttgggcaaatcatttttcctctacttttaaagtagtgccagagcatcgtccaaatcagtcaactacctctcagaactcaggtatgtgtttttaccttaatacagatggtgctactcactctgtatctagtttctctgctacagggggagtaatatacgatggtaaaggacaatggatcttaggatataatcgnnnatttggg

SEQ ID NO: 12974 - DNA, 590 bp, Gossypium hirsutum
  misc_feature (529)..(536): n is a, c, g, or t
ctcccgaaccagttttctcaaatctcgtagaccaaaatcatttttaaggtgagccaatcacaccgcaatataagatcggtggtgacttccattttcattttcaaagtcgatcctgtttttcaaaaataaaaaaatggtttcgacaaggcgtatcaaaatttttaaaaaaatttattaacgtcctcaaatttttttaaaattttagttggctcccaaaatttaatgccaaacactactgtctaagaagaagttcactttcacttctttcaaccattttagacatgatattttaaagtaaaaataagttaatttgaatgatattcaaattcattatatgaaatatcaattttaaataatgttaagtaattaatattaattatttttaaaacttaattttaatatataaatcatatttgagatattaaaatcacaaataaatatatctttttataaattaataaaaattttctaggtgactcaaaatacaaaatatcattcttttcctgtgcctttataccattatgcaaannnnnnnngactacaaaattcttagagggaaagtgatcctatttagagtcaagagatgaggt

SEQ ID NO: 12975 - DNA, 668 bp, Gossypium hirsutum
tctcatgcagatgaaggaaaggtgttacatgtttattggcttggaagataaggatgattatggtgtgatttggtgtctaaattttttaattcaaaccaatccaaattacaacaagaatcatctccgacaaaacggaaagaatttggcttggtttggtttcttatttggttttcgcctcaaaagtcaaaatcatgtaaactatgacatgaaaaaataatgaaagaaaaagtcatcccttaaatttcgagtgtgtataacttctcctcagaggaaattgtaatctaaataatgcttatatattttagacataaataaatatgtaaaaaacttcctcgaataagataataaaataatagtatatattatattatttatttttagtttggtttttggtttggaatttgggtaggctttaaaatattacgaaactaatatataatttggtttgcttccgaactgaaattttttaactccgaaaccaaacaactccaaacgaaagcaatgggtttgatttgtatttttggtttaaccaaataatactcagccctatcaggaagtcttgctgttctgtcttttattttttattatatattgattcttgtaagatcaagaactttatcccagttcatgagagtatctcttgatggaccaggaattaacagatcaac

SEQ ID NO: 12976 - DNA, 429 bp, Gossypium hirsutum
agctttattttgtttatgagataattttattaggtaatttcaatataaattgatttgtaggacctaattgtgacaaagtttggaagtaaagtctagtgataaaattctgatttccaaaggttataaagtagtttaaagtgatagaataaagtgttaattgagaaaaatcagctcaattgagagattaattgagcagggacgaagttatcatttattgaaagcttaggggaaaaatggtaatcaacatcttgcactaaaacagttttggacagcagcagtaggctaactttgaaaaatcaccataaattgtggaaatcgaaattgttcatggtattgatgagctcatcaatcatggtatatattattgatacatgaaaattattggactaacttgaatgttgagtttgtgcatgttaggacctctgaaaa

SEQ ID NO: 12977 - DNA, 749 bp, Gossypium hirsutum
  misc_feature (452)..(460): n is a, c, g, or t
  misc_feature (490)..(498): n is a, c, g, or t
  misc_feature (507)..(519): n is a, c, g, or t
  misc_feature (524)..(525): n is a, c, g, or t
  misc_feature (538)..(553): n is a, c, g, or t
  misc_feature (559)..(559): n is a, c, g, or t
  misc_feature (567)..(571): n is a, c, g, or t
  misc_feature (573)..(576): n is a, c, g, or t
  misc_feature (582)..(582): n is a, c, g, or t
  misc_feature (584)..(586): n is a, c, g, or t
  misc_feature (590)..(592): n is a, c, g, or t
  misc_feature (594)..(613): n is a, c, g, or t
  misc_feature (615)..(616): n is a, c, g, or t
  misc_feature (622)..(628): n is a, c, g, or t
  misc_feature (638)..(644): n is a, c, g, or t
  misc_feature (647)..(650): n is a, c, g, or t
  misc_feature (652)..(655): n is a, c, g, or t
  misc_feature (658)..(658): n is a, c, g, or t
  misc_feature (661)..(663): n is a, c, g, or t
  misc_feature (666)..(674): n is a, c, g, or t
  misc_feature (677)..(690): n is a, c, g, or t
  misc_feature (696)..(703): n is a, c, g, or t
  misc_feature (710)..(710): n is a, c, g, or t
  misc_feature (712)..(714): n is a, c, g, or t
  misc_feature (725)..(737): n is a, c, g, or t
tgtcaaacggttgcaattttgtcctctcatgtactctcaagtctcatgtatatattagcaagggtttaaattatgagcgcggttattgcagtctgttgagttgaatattgatggtgatagtatagttggtatggtatcgataattcgttggtaattatcaattttaaaacaaaatgtaatagtattgataatgtatgattttggttttcatatctatttgtagcagtcatcattcgcttctgtgtactggttaatatcgatcattatcagtttttattggtctaaggaaaagagtcggagagagtataatgtttttagagcttcaaagtcggtttagatcctacctcaacaaaaacagtgctttcatggtactttcatcgctaaccaatcggtcaataaataaattgtttaattaaaacggtgtaaaagtatcgtgaaagccctttgttcannnnnnnnncaatgatgaaaattaaacggagagcgaccnnnnnnnnntcatcattnnnnnnnnnnnnntattnnataattttattannnnnnnnnnnnnnnnttttcnttattttnnnnntnnnnctttanannntgcnnnannnnnnnnnnnnnnnnnnnntnnaatttnnnnnnncgtttacctnnnnnnnttnnnngnnnnatnttnnnaannnnnnnnnccnnnnnnnnnnnnnncttacnnnnnnnntttattncnnnttttttatctnnnnnnnnnnnnntctctcttcttt

SEQ ID NO: 12978 - DNA, 659 bp, Gossypium hirsutum
tccatttcaattcccttgctcttgagccgatttcttcccttggaaaagggttgttcttcaaccattttggagcagcaattaagtgttcatcgaagccttgattggtgaggacaacaagaaggaagaacgaagcaactaagtcaagcctcaaaaaaccaccagatttgattcttttccctatctctttaatttttgttgttgttatgatgaacatatctatgagtattcatgttgttggaatggttaatttaatcagcttagcttgaatttaattcgtgttgggttgattttatttcatcttcttaaattgttaaaattgtgtttatgttgttataggcatcgataaaatgcttgattaagtaaaatcatgcctaagttattcttgcgttacgactgtgaggtaactaatgaattaattatttaaacagattgaaattgtaattaattgacacaacacttgatcagtgcgtgtttattcttctaaggtagctgaaggttaaattagcaatgtatctggtgatattattgccttgcataacttgcaagattattatgattaaattgtttcaaggtagggataccttgttacctcacattgtcttttatatgcttgttagatttaattaatcgtttgaattgacattaaggatacgcaagag

SEQ ID NO: 12979 - DNA, 659 bp, Gossypium hirsutum
  misc_feature (60)..(61): n is a, c, g, or t
ttgtgtataagtgttcattataagtggcatattttatacttgtttataagttgattattnntttccaattatgtggttgatcatagtttgatttagagatttgaatgtgatattgaaatttatatatggtggatttaacttgatgtcatgaaatgtgataggtatgttttgtatatgttttagatacccacttcatgtgttacatcttaggttagtgtaaagttgtttaagcttggttttagtttgcttgtgtatgtgtcttttgttttggcatgtatatgttcatgtaaatatgtttttggccatttggtataaacatcatgaaagtgtttgaaagatggtaagatggaatgtgaatgagttgcatgagatggtaagtttggcatgtgtttaatgtaagaacttatgaactttgaatgcaaattaatttggtatgaaatttgaatttggttgataattgaattgtggtgtcaatgagaacacattggttagacacttagtttgaatgttttggcatgtttaagacttgtttaaatgtgtttttcaagtatggaaatgatcgattttgatttggcttggtacctaagttttggatgaaagtttgccttgttttagaagctttttaaggtgcacacggcttgagaaacgggctaccacat

SEQ ID NO: 12980 - DNA, 566 bp, Gossypium hirsutum
  misc_feature (477)..(477): n is a, c, g, or t
  misc_feature (502)..(506): n is a, c, g, or t
  misc_feature (511)..(511): n is a, c, g, or t
  misc_feature (555)..(555): n is a, c, g, or t
actttctcttcctagatggccttgaaatgcagccattagccttctccattggtagattttttcagaaaattacctgcaatgataaaagagaggatagcaacactattaataaaaggccattataaatcatcgtttaaccattaaacagatgaaccaaaaaacccaaattctttgtcaaatatatctcccatcgtagggtatatatgaaacaaggcaaataaggcttgaatatatcacatcaattaaagattaggaaaaatttgacaacctaactaacataagcatcaaaggtccacacatgacttgaaagcactaagaggctctccttttcctaagctcttcactcaccaaaaagtctcttggtggaaaaaaaatagggtaaagaagagcaaagaatagtactactattaaagaaatgacaacatcataacaacttggttagaagttatgacaaaagggccatagaaatttcctttntttttcccgaaaggggtccaattcnnnnncaaantagctccactcaatttcacttcaatgaatgcatagagtaaatcnttcaaacaaag

SEQ ID NO: 12981 - DNA, 653 bp, Gossypium hirsutum
ctttatagtttccagggaaaaatgtcaaacaaagattatcatcattatttaatacccagaaatttcaagtgtagatatgatatgagactggtagttttgtggatttgactagtaagtaagttgggtttcatttgcaaatttgctttaagctgtttgtgttttgttttgtgctttttggatacaaattcaaagaatatatttatcataatcatcaatgcatatagataggattaagcaaacatatttgttgaatttatcaatataatttatgaaatgtatcaatcaaattcttttatccgtctcgttataaatttaagtatagaacttattctttgtttatttttaatctctaagtatcttacgatctatactatattgattgccctcaaacagttaacgtaattaatctctcagtataacacaattattatgaatttgataataaaacaataatgataataataaatagtctaaatgagatctcatatcttgtcatccacgtggtagaatacaatgagccatgttaagatacctttagcccccacatgaaacccccacaatctcaccatgcccatgtgggattccactatagctagtaatttagtagtgcatttatctatggaatttttgtaccacaccgacaacaacatcaa

SEQ ID NO: 12982 - DNA, 407 bp, Gossypium hirsutum
cagtcgcaagaaacttaagaaatctccaacctctaagctgtgcaacaactaagtatgccttccaatgcattgaaggcagaggcagagacagaggcaagccatatccctcggctatttcttttaactgttgtcttccttatagctaatattttataataaaaaaaagttataattatttccaataattaaaatcagaaatccataggagtgactcatttcatttggaaactatataatgctcaaccgggttataagtagggatgacaaaaaagaaaacccaaatccaacatccgacccaatccattagaatcggattttttttttttttaaaaaattggtttaaattaaaaaaaattaaaattttggaaaacccccccggcccccccccaaaaaatttaaagggggaa

SEQ ID NO: 12983 - DNA, 670 bp, Gossypium hirsutum
gtaaatggagaatttaagagggattgaaaatagacattccatctttttaaattttatttaatgggttttaactttgcttccaataatcacaaggcatttttctcgtcttttgactttaatttttttcaatttaattactataaataagataattgtgtaaattagtcattattattaaaatttttgtttcttttaacatattgttgatgtgacacattagccaattaaacgactgatatgtgacaattttttatttacttttgactaaagtttaagaaaacctctctataatgtttaggggaaaaattggactaattataggaagattcctaaactttagtcaaaaatcaaaaaaaatattatgtgtcagtcactcaatgtgctaatgtgccacattagcaatccgttaaaagaaaacaaaaattttaacggcaatgactaattcacacaattatcttatttataataactaaattgagaaaaaaaattagaatgatcaaaatagaataaaccctattttagagtgatcatggatgtaatttatcctaacagtaatgattatatatatttaaaaacttgaagtttgtttgcaacaattttccattttataccagcaacttctttttctctgttgcttggaagctcttttcatgtctctccactctcaaag

SEQ ID NO: 12984 - DNA, 655 bp, Gossypium hirsutum
ctttttttttgtaattaattttctctccccatatttttgtatttaattaaaattttaatattatttttataaaacaaccttaaatttaaataaattttctgcttatgaagaaaatagtgtgtcaactcgaattgcttaaatcgtggtggtattcaacaaccttgttttccaattaggtataactatatatttagtcttcaactttactttttttatcaattcaattcttattattttttaagttaaatttggtcattaatgttttttaatgaaaataataattaaaacattaactttttaatgatatcagtgtgacaatctacgtaacaatttacatatactttgtattcacaaatatgcttttcaaaaaaataattttttttaaaaggaaacaaacacaacacacatgtaataagctttggtgacaaacgacgaccttaattttcaaattaattgacactaaaagttggtatttaagcatcaaacgaattttattgaaatttatttctaacaacaaaatttgtccttgtgatattttaattttataatatattatgtaatttaattttctgtttattaatagaaataaaatgatttgtccttagtattttttttttaatttgaaaatattttcatttccaaaattacatgagga

SEQ ID NO: 12985 - DNA, 664 bp, Gossypium hirsutum
gaacaagttcagtgatattctacgcatgcattaaacctaaataagccatcttatatataaacatagtgtgacctataaaaatagaattagtttgaatatttgattcttcaaaagcacctttcaaatatgtcttcaataaagagtacattagtagtgatcttctcgacattaaactccttaaagatcaattggaactttgatcacattgaaagtcttgatacaatctttttttggcttgagtcatgcacgatatgtctgtagtaatgagctgttaaaaatctttaaacataaacaattaaaagctcaaacaatgttggtcaaaacacgccaaccaaataagacaacaagttacaacggatgtttgttgagttgcaattggcctttgtaactagcactaatgatctcttcctttgatatttttgaacaaaaacatagcatcacatcaagcaacgtaaatactcgacactccctctacttcattcattcaactatgaattttaatcatgaaattaattattgatgagcattaacaatcaaaactcatattattaaaatattatagtaaatgtgactacatgttaagtaaaaaaacaaattatcatcatctgtataagaaagaaaattagaaagaactttaaaaaactcagcactaacaacagccaac

SEQ ID NO: 12986 - DNA, 603 bp, Gossypium hirsutum
  misc_feature (18)..(18): n is a, c, g, or t
  misc_feature (54)..(56): n is a, c, g, or t
  misc_feature (60)..(60): n is a, c, g, or t
  misc_feature (63)..(63): n is a, c, g, or t
ggaggagcattgatattnggctgaaatagatggcaagattttacccaatcccgnnnaatnagnattcggttaaaaaatacttcgcttaaaaaaaaaaggggagaggccgaggtgaaaactcacaaagggcaccttgagaccaaaagaattttgaattgaaaacccgcaaagggcgattcgaattttgatcaaaggtggggcatacggtagtcttacgatacctaaattaacaaggaggagagatgttatatcttggggcatctacaaagacactctagatgccctaaacacatattgggcaaaacgggagtccttaagaagttcgtacagagaagctcacgttgcgatatctggggcacctattttctttttgttcattccagcaatgtttgttgtttaatctattccctttaaattttgtttctgacaaatttcagttatgtcattgttatgatctttctcaagcattttgcattgaaataaaaaatttgaagaaaaagataaaatcatcaataaatgtttaataaaactaaaaaaaaaagttaatttacccaaaaaacctatctatcggcaatttttaaatttcccttttcccttgaccca

SEQ ID NO: 12987 - DNA, 676 bp, Gossypium hirsutum
ctttgcttcctcttggttttcttttcccatccatactctcctcccaatgccatatatctatagtatttttatatgcatggaagaattcaacatttatgtttaaacatttgaagtcaattaagaaagtatatgctttaagttgtgtcacttgtttaatgatgggtgtattgtttttggaatgtttatgtttggttttagccttgagtttttgttttctactttaatgagagttcagacgggtttatagaattttggcaagagtacctaggaccatcaagatcaaaatcataaaatattttcttggtgaacctaggcactccgtcaaaatttcgtgaacccctctaagctctcttcggagtagggagacaaaaaccagaagctaaaaccgagcataagcacccggagaacaatacattcatcgttgagggaatgagacactctataatagatactcgctctcaacaaagccaaatataaaatgattactataatatgcgggtcttttacaaaaatattacaaaaaataaaaaaaaataccaaaataatattaattttttttatttaccaaaataataccaaaaaaaaacatgacagcctggtggagggcctgccacaggcggcatcggactggtggagggcctgccaaaggcggcaccggacttgaatgtaacgatct

SEQ ID NO: 12988 - DNA, 538 bp, Gossypium hirsutum
  misc_feature (451)..(453): n is a, c, g, or t
  misc_feature (467)..(467): n is a, c, g, or t
  misc_feature (479)..(483): n is a, c, g, or t
atgttggacagtttgccaacacgaatgccatggtaattttaggaagatgattgagtcaacactcaacacataccagttttaggccaacgatacttgtaccagaaaaatctacctaaaaagaggagaagatatcgtgggctactagagttaccttaggaagaaaagcttataaaaagccaaataaggaaaccctaaagggtgtggagattcgaagggaataatagagggtagcggctgagttgagacaaaaggaggaaattaaaggcagtccctttcacgcacaataagacattgtgctgatggattgtggattgacttggtgacaaccatctttctaagttcttccattatttcttaatttgttctcccgtgaattaatttgatcaaaataatgttgggtgttattttgaacttgaattctatttgccaacccatgagctaagtctcaatnnntcacctgtggattngcttcatctcannnnnattgaatgataatttggttttgagttttatttgccaacccatgagctaagtctca

SEQ ID NO: 12989 - DNA, 643 bp, Gossypium hirsutum
tgagagtcttgaagcataagaagaagaagagttgatgttggtcttaagtgaaagggaatttagcttagattgaagagagaagcatgaagaagacaagcaacagttaagtgcagtcgccatttttgctttctcagtttcttccccttcctatatattatctaaacaaatgaaatttgagctatatgttatggtttttttatttattgtcttcagcctttttgcttatccgatatatccatagccagaacagagggcataggcgtaaagcttgagtggattttttataattcctattttacccccgttctttctaagtactcacccaagagaaaatcttatttacttcaaaataaaaaataaaacaattaaaaactgtaatgttatttacttctaaataaataataaaaaattaaattaaattcgagatggggtgacgaggagtcgagtcttttattaaatttcaaattcgggacggaatttttttcttaagagttgaggttgggttagggtggttaagcttcagttagagtcaaggcatgcaaaaatcaatccggccccctttgccttctctaatattattatttaaagtgttgattgaattggtgttattttcaaggggaaactacaccattagttacaaaaa

SEQ ID NO: 12990 - DNA, 668 bp, Gossypium hirsutum
  misc_feature (192)..(192): n is a, c, g, or t
  misc_feature (237)..(237): n is a, c, g, or t
  misc_feature (486)..(486): n is a, c, g, or t
  misc_feature (545)..(546): n is a, c, g, or t
  misc_feature (551)..(552): n is a, c, g, or t
  misc_feature (556)..(593): n is a, c, g, or t
  misc_feature (598)..(598): n is a, c, g, or t
  misc_feature (600)..(610): n is a, c, g, or t
  misc_feature (612)..(612): n is a, c, g, or t
  misc_feature (614)..(614): n is a, c, g, or t
  misc_feature (625)..(631): n is a, c, g, or t
  misc_feature (636)..(643): n is a, c, g, or t
  misc_feature (648)..(654): n is a, c, g, or t
aaaaatatctctaatgaaatggagattagattggaaaagaataatataaaatcatgattaacgtcttaatttttaatagaaatttgatatgtgagagattgattgcttatattggataattctaacttaataattaattacagccatttaattatttgttttcttattaaaatatgcgatatttatttttanagtacttagttttttatttataaaaaccaatttataaaaataaanaataaatattttataaaatcatttaactaataaattttaacagataaaataaaaaaaattagtataacaaaatggtgtcattttatttaaaatgaaatgatttttggtggcgtttttaataaaaacgccacaaaaagttaacgggcggtttttataaaaactccacaaaaaaattatttcacctaaaaacaggcgctattttatccccaaaatttagcccaaacccctaatttttcccctaaaatcggnatcgccaaaacacccccaatcttacccctctgttgctcttttcaatcaaaaaactctcnngcagnnaagnnnnnnnnnnnnnnnnnnnnnnnnnnnnnnnnnnnnnnaaaancnnnnnnnnnnntntntcccaaaatcnnnnnnnttatnnnnnnnnaattnnnnnnncttattttttttta

SEQ ID NO: 12991 - DNA, 536 bp, Gossypium hirsutum
  misc_feature (496)..(497): n is a, c, g, or t
  misc_feature (499)..(500): n is a, c, g, or t
tttgttttattttttttttataaagatgatttgggttttccataaaaaaaaataaaaaagttaggtttgcagtattttacaaatttttatggtaattcaaacatttacaacatttacaagatagcaaatataggcaataattttaatactacctctcttttttagttaatcctagattccaaccaaaattttaaattttaaacaattcgggcctatatttttattattttaatcaatttcaaataaatataaatttaattaaaaatattgtcggttttactgttttattaatatatttattattaattaagagtaattatttgataaaccttaactaaagttttttaaactccacaagggagttgagggggggacaagggtcacattttttttactacattctataatacatttcttaattattatctatactatatagggcgaatatttgatatactgcaaagtacttttttttttcacaagtaaccttaaaaanntnnacatgtgtctttctcttttttaattatttatttttt

SEQ ID NO: 12992 - DNA, 570 bp, Gossypium hirsutum
ttatcactgatatgtatgtgtcaacctgagaataccttagtactgacttcttcaccctccaacggcctataaactgtcagaggcctatgattcctgattctattctcttccttttgttcattaaccatcggatggtcacctattttgcggaattgccaatgtgtttgattcctgcaatgattttccgacacttcctgtatttctctaatcacttaagcttgtaggatgccaacatttgttagttcttaattttgtaagctatcttctggttcatacttttgctatttcaatttttctttcagaggagaaaaagcaaagaacatattctgaagaaataaatactatgtaatcttttagataccaaaatttattgttttacatttatgcagactagaaatgttagattggtgagacattttaggcctttgttcatcttttaatcaattatcctctggtttttaaccatttgtttttgctttatagaagcttttggaaagtttacccaaaattaaatagtaaaaaggaagtataaaagcaaagcaattactgaagagttctttagttttttct

SEQ ID NO: 12993 - DNA, 713 bp, Gossypium hirsutum
  misc_feature (54)..(55): n is a, c, g, or t
  misc_feature (609)..(627): n is a, c, g, or t
  misc_feature (629)..(633): n is a, c, g, or t
  misc_feature (640)..(641): n is a, c, g, or t
  misc_feature (643)..(643): n is a, c, g, or t
  misc_feature (647)..(653): n is a, c, g, or t
  misc_feature (655)..(656): n is a, c, g, or t
  misc_feature (661)..(666): n is a, c, g, or t
  misc_feature (669)..(669): n is a, c, g, or t
  misc_feature (671)..(674): n is a, c, g, or t
  misc_feature (679)..(683): n is a, c, g, or t
  misc_feature (689)..(690): n is a, c, g, or t
  misc_feature (698)..(702): n is a, c, g, or t
  misc_feature (705)..(710): n is a, c, g, or t
gcttatgtgcagaaataaacaaatcacaaactgaatttttcgttattcaaacgnntttttaataatttatcatatcatatatcaaacaagttaaatgaacaattaaattaccatgcatcatacatgcacaattactttatgccctttcaatagtcttaaaccaaaatatccttaactatttagagaacttttatctttccattacccatttagtctttaatctattagccaaaaccttaaagagccactctatgcatttatactacttatgcttttttttctatctatatcattagtcttggagctattttaaattctttaaacttttccccaagtcttatatcatgttagctttagaaacattcgtttttctttacaatataagtctttaatcaactactaatctttttagaacaatttagggtaaactatacccatattcactctaaaatagaagttgtcctattttgattatttcaattttcttttctcaaattagtcaatttaattaagataattattcgaatcagttaccaccactaaaaattctgttaatccactaacagattgctgatgtggcgcattatcccattaactgattgggacaannnnnnnnnnnnnnnnnnntnnnnnttctctnntncccnnnnnnncnnctccnnnnnnctncnnnnctttnnnnnttcctnnccccctcnnnnntcnnnnnntct

SEQ ID NO: 12994 - DNA, 513 bp, Gossypium hirsutum
atgtgccaagttacaagcagacatggtttctaaccttgaaccttttctttatcacatcacattcattcttgctgaccactcattcgcttacaaaattaacacgtttgtttagcctcgtttttctcgttttggattcagcccttcacatgttcttatctgattaaaaacaaaagagatagcagcaatagatgtgggtactcaaaaactgtttagctttacttctttgtccctggactgtttttgcagggactaagttaacaaatttagagcttagacatgatgcagataataggaaagaaaattgaacctgtcgaaatggtttctatttttaggattcggcaaatgttttttagtaccttcccaattgcatgggagctaaaattttatcttcacatatgaaacttgcacgacaacgacaaaactgaatttaaagtaaggaattaatgagtaggtccttatggaagggcctctcctttttacccagaaaaatgttatcctcatcattgccatacc

SEQ ID NO: 12995 - DNA, 700 bp, Gossypium hirsutum
  misc_feature (441)..(442): n is a, c, g, or t
  misc_feature (445)..(445): n is a, c, g, or t
  misc_feature (447)..(447): n is a, c, g, or t
  misc_feature (457)..(461): n is a, c, g, or t
  misc_feature (476)..(482): n is a, c, g, or t
  misc_feature (484)..(484): n is a, c, g, or t
  misc_feature (486)..(486): n is a, c, g, or t
  misc_feature (488)..(493): n is a, c, g, or t
  misc_feature (496)..(498): n is a, c, g, or t
  misc_feature (500)..(506): n is a, c, g, or t
  misc_feature (508)..(508): n is a, c, g, or t
  misc_feature (510)..(512): n is a, c, g, or t
  misc_feature (517)..(518): n is a, c, g, or t
  misc_feature (531)..(533): n is a, c, g, or t
  misc_feature (535)..(551): n is a, c, g, or t
  misc_feature (553)..(558): n is a, c, g, or t
  misc_feature (565)..(569): n is a, c, g, or t
  misc_feature (572)..(572): n is a, c, g, or t
  misc_feature (574)..(576): n is a, c, g, or t
  misc_feature (578)..(584): n is a, c, g, or t
  misc_feature (586)..(587): n is a, c, g, or t
  misc_feature (591)..(596): n is a, c, g, or t
  misc_feature (600)..(602): n is a, c, g, or t
  misc_feature (604)..(605): n is a, c, g, or t
  misc_feature (611)..(623): n is a, c, g, or t
  misc_feature (626)..(644): n is a, c, g, or t
  misc_feature (646)..(649): n is a, c, g, or t
  misc_feature (655)..(656): n is a, c, g, or t
  misc_feature (658)..(658): n is a, c, g, or t
  misc_feature (661)..(666): n is a, c, g, or t
  misc_feature (668)..(697): n is a, c, g, or t
gattagttaagagtaaatcaaatagataaatctcaaaatcatatataaactttgatttattttaattatacacataaaaatttgagtgtggtttaattatatatatgaaactttaattttaattcagtacgtttaaaaaaataaaaaagtatcaatttattttatattgaaaaaatataattaattgtgtatgcaatagataaacataaaatgatattatatcaataattatattaataatttatgagattaaatcaaataaaaattttatagattttgaggatgagaaaaagacccctgctccactagttgcctatgtctaggtactgtaatgtaataaatccctcacagtttatttccctattttcaaatagaaaacaagttccgtgtgtgcaatgtatatatcctttagtatgcttgtagtcggtatagtgggaaaannccncngtctaggatnnnnnaggcaaactataacnnnnnnnancnannnnnntgnnncnnnnnnngntnnnttttnnccctactttcgtnnntnnnnnnnnnnnnnnnnncnnnnnntgaaccnnnnnttntnnntnnnnnnnannaatnnnnnnaccnnncnntttttnnnnnnnnnnnnnttnnnnnnnnnnnnnnnnnnncnnnnctcttnnanttnnnnnnannnnnnnnnnnnnnnnnnnnnnnnnnnnnntat

SEQ ID NO: 12996 - DNA, 546 bp, Gossypium hirsutum
  misc_feature (56)..(56): n is a, c, g, or t
  misc_feature (499)..(500): n is a, c, g, or t
  misc_feature (515)..(517): n is a, c, g, or t
acggcttgctgacttgtaacgggaatatgggtggacctgttaaagatgctaatacnttcttggctagatggatgaaaagaagcacaaagctcaggacatctcttcatacaagtgtgttccccattggctccataaatataggcctgtctcggcaccgtgctttactcttcaaggttaatttttgaagttttgagaatgacttcagtgcctgttctgatatggttattccagttatgcctagtataaaaaaaatgagttcaaaataatcatatgcaattcggttaattaagggtggtttcccaatgcaatttcaaagaaaaaacccttgaattttttcatgggctgggattaaaactcattctttgcaggactgaccctctgaaggggtcatgataataaacagggctatgcctttgcctcaggttctaatatttagctattaagttctggaaacaaaattgccttgatttatctttgttcttttagtggccactcctgnngttcataattttgtnnnagggctatgtgcaaagttatattatattt

SEQ ID NO: 12997 - DNA, 635 bp, Gossypium hirsutum
actcccacctggttagcaactagcatgccttaccagtggtctcgcacatttaccattctggtttgcaattaacatgccctaccagtggctctttatatctggatactaagtttatatcccaaggaagtcatatccatttcattccataaacatgcacacatagaagattacatgcaacagattcagaagttccgtgccaatgggtttacctgaactttaagctataacaaccacagtttgtgatatacacaagatagaagcaaactcaaagaagagcaaaacaaactagatactcacaaataatcccaacgaggttgttatactatctctattgctatacgtacaatcctttcttgctaatcaatcacttgctaattcctctccaacgaagaactcttccttaagtaggataccaaagtataacaaagcaagagaagaaggaaaaaaaaccccccactacaaaagtttcactaatatttatagctcacaactctctctctttctcttagaactaacacgtggctaacatgcaaagctaactcatactttatatgtggccaacataatcattctaggcatatcacacaataaaataattattaaactttagttaattcctaactggattgatagca

SEQ ID NO: 12998 - DNA, 534 bp, Gossypium hirsutum
ttgcggtttgattacttacatttggacctcacttaaagttaacaagattggacaattataccaaattttatatactaaagttttcattttttttcttctctcattgttcagtccaataaacccaattttagggctatgaaaatattagacccaaaaagctttattttttagcccaacatatagattttgaatcaaggttacctatctactttgtataggtttggtctattgatctaacctaatctgatttgaggctaaggttaatttgtcatacaccttctttttttctttttttttgaatggattgtcatacaccttcaacatcaacttgaaaggtacttaattgaaattcacttaactcattcaaatttgaaataatttaaatttaaattaatttgtatttaaacttaaattgaatagaattggagtcagataggattatattagttttcgaattaaactcctcaaaatttaaaatccaagttaaagagaaattattttatgaatccttctcatcacatcatttgaggaaaa

SEQ ID NO: 12999 - DNA, 646 bp, Gossypium hirsutum
ttgtgatctttagacaaattatatgcctgtaaaaagtgacatctatgaaataaagcatgcagcagctaagctatgccgtattaaagaggaaccatattgtgtatccaaaggagagaggtaaaaggaaaaaggaatctgaacgtggagcattgataaatgctttacatgctagttcagcaataaatatagtgactattacacttagagcaaatgtttttcactctaatatcatcaataaaattgaaaatggtaaaagcatgtgctactttctacaaccatttccatgcagttaaaagggcaagaacaacagtcccttaaaagtgctagaatattaacttacgacaaaagcactacttgtcattcaacttgtacatcctttcatctcacaactttgagaggccttaaggaaaggctctgtggaaataaacaaaattctgaaattctgttttcagggttctgcagaaaagaaaattgtacctgcccctttctagatattacacaacgggaatcaccagcattagcaacaactagttgcttgtttcgaattattgcaacacaggctgtgcatccagaagtaggtccatgaaaatcagagtgagaaccctagtttgcaaccaacagaaaagtcaacatcggaatctcacaa

SEQ ID NO: 13000 - DNA, 682 bp, Gossypium hirsutum
gccgaagcaactcatactaacttttatttcatttattatgttacaagaaataaaataaaataagtctcatatatttctaactatacatataaatgtgttcaataattgtcaaataaagtcatttaatgtatttggggattaaacggaatcaaattcggagttactattcaaatctaaactctaaataccaaagtccaatagtgttgtctcaagaaaatgataccatgtctcgagacaggtttttctaatgtgtctatttttgcttcgatatggatatgtcttgaaacaccaggtccatgtctcaagactagatctttcatattttgagataaggcttgagacaaattcactattttcttaatttaactttgattttttaatgtctcgagacaaggggttcttgtctcgagaccaagaacagggaaaatctattttatcttcgaagtgtcattgtttcaaaacataagccattctttcttaagacttctttgatcagtcttgagacctaaagcaatgaaatgcaccaaatggtcaattttgttcttgtggtcttgagacatgttcgtggtaatattgagacaagagagtcacttgattacttacaaaaacaatgcacttgtgtcatgaaacaagtcttgagacagaatgacttgtgtctcgaaataagggcactttgaaaaaa

SEQ ID NO: 13001 - DNA, 544 bp, Gossypium hirsutum
ttgaatgtgagagtagaacacgttacaaattcaagacaaaagaataatctaaaattttaagtagagagggaaaacgtgggttaaggcaatggatggttattataagtagctaggattagtgaggcatattgggttaataaaaaaactgttggcttagttaaccctagttaaggttatatgatttggattccacctccaccacttaagcacttttttattcttgtatgcttgcaagaatattcttatccacgtataatagaataatgaatggcttatagttgctgtttttttattggtataatagaagattatgattaacaaatgtgttgaaaccattgaacatttggagaaaaaagaaacgatttgttgttatggtagacttgattttcataaaatccaagtttttcctttgaacaagaacaaaaatctactccatcttacctcattgttaaagaaaaaattgggtgctgaaaacttggatgcaagggtggtgacaggaggtatattctcaatggcggtttcctggtcaagatcatgttcatca

SEQ ID NO: 13002 - DNA, 494 bp, Gossypium hirsutum
tctttctcctcaagtcttcattctgccttaataactcttgctgaaatgtttgttattgctcaaacctaacattttgcaaagtcatttgctccctcatcaatctcatctgctccttaagagcaaaaaattgttgtggggatgcctcttaatcggagggaagtgataatccctaaccaaaagggatattcaagtcaaaagaatttgaggctcctgcatgagctgaattaaccaaattttctggccgatcagcaaaccaactagcaaataaatctgcccactgggctgattacaagcactataaactccaggttgtactgtcaaaaaattaatgggaaaattctcattagggtgagccattttgattttttgcttctctgtctctcttagatggtgagacttctctatctatattatatgggtattgttcactgatatgacatactaggtaggttccatacatgtcaacaggtatcctattctagacttaacatgtg

SEQ ID NO: 13003 - DNA, 389 bp, Gossypium hirsutum
  misc_feature (72)..(72): n is a, c, g, or t
  misc_feature (319)..(319): n is a, c, g, or t
ttgaaaagcatttgaagcgaaaatgagtcaaccggacctgttcaacgtcttctaccaacaaatggactcaangaacgagcaaaactcctattcggcctaaggaaccatctgttgctgctcagcccaatcaaccaagcggtgacactggtaagagtagaaatgagcccgttcctaattgagctcgtgacataaagtgttttaagtgtcaaggtcggggccatattgctagtcaacgccctaatcgttgagtgatggtggtgcgatcaaatggcgagatcgagtccgaagatgagcaagaaagcgaacctgaaataccctnacaaaaaaataataaaattgagatgccgatcgagggagagatactcgttgtaaaatgaaatttgaatatt

SEQ ID NO: 13004 - DNA, 474 bp, Gossypium hirsutum
ccatcagcgtccaccatgataaaccgacgagttgtcctggtgcaaccccgtactctttaagaactgtgtagaagaataggtgcaaggggagatggaaacctaccttgaacaaataaagagggagtatgaaaccgcttatagtatcacttaatcgacattcccccttagcgatctcaaattcataagcgaaatcaggaaaccggattcccctacccgccaaattcattatttatcgttagtattttggcactggtaagaaggaggttctactggaatactgacctctcgatttcatggcctctcaccacccttaatggctgacctacccttacagcctcttggggttctaccactatggcctcttcctctaccacgacaactctctcttaccattttgacaaacgaagtaaaaaagaagaagaggaagatcgaagaattacctttaaaatggggttaagttctgagtgaatagag

SEQ ID NO: 13005 - DNA, 577 bp, Gossypium hirsutum
aagtttataggagtaggagaagggaaggcgacaaattaggctttcagaaggaattaggcattaggatggttttagagattcaaagatatgtaggaagttgagaacgacattcatttttttttagatcttcacgttttaaagccataaatctaaaatgaaattccattgggattaatgaattttgtttaatcttgggatcccacttcttaaaatatttatttggttggatttattaagatatttatttttgacattatacatgtaaatattttaatctatctaatatttttatcatttcgatttaaaatattgtttatattaacatatattgttagttcgattgatcattagaaataactatggtggaagcaaagaaagaatattcaacaaagaacacaacgatttaatagtgattcgacttcaattgcctattccactaccttaacttttcacaactaaaatttttactaaattcactaatttgacaacctttgagaaggtttaatcttacaatctcccttcagatttctacctaaaatcttaagattataactcctttagggtttctactcaaacc

SEQ ID NO: 13006 - DNA, 600 bp, Gossypium hirsutum
  misc_feature (51)..(53): n is a, c, g, or t
atgatgaaagtctgaggagatggaaagaacagcttcttgggagcgttgatnnntttgctcttggaggtactgtttttcctatctgttattcaaggagcaaacacatgttgaattatatttttgtgatgaaagcagagatggaggcggcagaagtgaagatagaaaggctgtcaatcgtatgtcggggccgaccagatattgttttgcccattccatttgtttcaaaccctaaaagcagcttgtttatactaaaggaaggaagtccttatcgtctcaaattctccttcactgtctcccacaacgttgtctctggtcttaactacactaacactgtctggaaaaccggtgttaaaggtgagtatcatatactttcatgttgggatacgtatagatacaagccatatttatatttaaagatatctcgtcagaacccaacttaaatctccaacacaagaattctaacatgatccattaatgaaacaacatggcagtagagaaaacaaaagtgatgttgggaacatttagccctcgaaaagatccatacacttatgaattggaagaagaaaccaccccttctggcttgtttgctagaggctccta

SEQ ID NO: 13007 - DNA, 417 bp, Gossypium hirsutum
gggaaaggttgaacccctgaactagaaccagctacaccaaacgaggtccatagggataacagaattcaaggcaccaattataacttgagttgatcattttaaattagaaaacaatatgctacaaaattgcatgtcacacattgatttgatgcaacaaaaagaactccacccccttcctccgaaaacaaaatgctttcttgtttcccttttaatccatgattttttttttcttttggtcttttaggaagtcacatttcttacgtgtttcagttgcttgttaccagtgacaaccctaaaccatagagcttttaatcaaggtgagtttcctatctaaactttcttgttcaaatataatgtgtacatataagtatcttcctttcaaaggcatctaacgtgagcatcacaacagatcataga

SEQ ID NO: 13008 - DNA, 656 bp, Gossypium hirsutum
tgtggaaatccacaagggtgataaattaactagaactcactataggtagtcaaagggttttaagccgaactagtaaatattgcccaacgattacactgccattaaagatggtcgagcattgagtaaaaatccaacaccccaggaaaattgggatcgtcaaacaaaatatggagtattatatttgtttcttttctaattgaaacccctgcaagatgagggtaattttagtgtaatgcagaaatgaaactcactaagctcattgaacttaccaaagtgttggcctaggttttgtaagattcgtgggataaagatctcgaaaagggaccaagctaaaccgtattagatcaaagatcattgcctgtaaagtgtcatgcacataggaatagggcatcttcagaggctccgcctcatagtcaaaatattgtaattaaatagttttccttatagtttggagtttgagatggtatattttgttctaatttaggatttttattgtaagaggagtatttatattaattgaaaaagtctgttgtgaaattttcaagttcaaaatttgattctaggttcgaattaggttcaattgtgacactctatatccggattcagcgattgggtcaggtgagggtgttacaactgcagtcaagcacttccattaa

SEQ ID NO: 13009 - DNA, 612 bp, Gossypium hirsutum
  misc_feature (562)..(564): n is a, c, g, or t
  misc_feature (567)..(571): n is a, c, g, or t
  misc_feature (573)..(578): n is a, c, g, or t
  misc_feature (582)..(582): n is a, c, g, or t
  misc_feature (589)..(589): n is a, c, g, or t
  misc_feature (604)..(604): n is a, c, g, or t
gttcttctacgttctcgctcgctctttcatctcaatcccagcattaatcgtcctttccctcagcttctgtcttataaccttctgggcaatcggcctttccggaggattctctgggttcctcttctacttcctcgcagcgtgctgtactttctgggcgggagttaaatagtggcattcattgcaggaatgttcccggattacttcctggcctttgtgatggccgtacgtcgcagtcgtttcccactatcatattttaattattaaaataattaatatgatttaattaacgttaccttatactaatttcatgaattaaaattatagtctaattaatttcattttccaccacgtaatgctcatgtagactatggttaattgatggtaacctatgtatacttacattaatatgtgagcacactgaattagaaaattactaacacaaaatatcaaaaaaaaaaggggaaaataaaaaaaaaaacaacccaaaacataaagggaaaaattggaacataaaacaaccccctctttggttaagccaaaccccctgccccgggcgaatttnnnggnnnnngnnnnnntcantcccttnttggggttaaaaccnctcctggg

SEQ ID NO: 13010 - DNA, 551 bp, Gossypium hirsutum
taccgaggtctgattatgagttattaaagggtaaaatgatgaataaaaattcgcaattttgggggctgttcctaaaggacccaataaattcttaattggaattagaggatcttttttaattgattgttttatcacattgtgatattttacatcgttgaatgggcccatgcgaaaacaattagatgctgacaaaattatcaaagattgggattccttatttctgttcaagagcgtatgaatagttccgtgattttggctaaacgattgttgaatccttgcgttggaataaatggaataaaacggatttttattggtacgatctgacctattatcagaaatcaattctgaacctgacggatcatttctttttctgatataaaaaatatgagatttcactaagtcgattcttaggaaatctcgaatcagaccatttgtccttacttcaacaaaagaagcacagacctcttcggcgaaagaacttttgttgtcttggtcccaactcaacactaaacaagtccgaactagttgaatacttgtgtcagaaatctccg

SEQ ID NO: 13011 - DNA, 724 bp, Gossypium hirsutum
  misc_feature (677)..(684): n is a, c, g, or t
  misc_feature (686)..(689): n is a, c, g, or t
  misc_feature (691)..(693): n is a, c, g, or t
  misc_feature (712)..(713): n is a, c, g, or t
  misc_feature (715)..(719): n is a, c, g, or t
tcaataacctctccaattttcctatggccaaggcacacgggcgtgtgtccggtggtgtggtgcaagttagtatgtatgctctgttttcacacggcctaggacacgggcatgtccagtagccgtgtgaggcacacgggcagcttacacaggcgtgtgacctatgaatgtaaaatttttctaagtgttcagaaatttttatatgtgatcagtttagtctcgaaccacccttaagcatgttttaaggtctcgtaaaaccttataagggacaatgtgaatgtttacaaatggtttttgataatgaatgtataaatgtatctaaatgggatgtattattcggtaatgcctcgtaaccctattccggtgtcggatatgggctaagggtgttacagaagtaattattcaattgcaatttaaaaagacataaaccattaaggttactttacatttctccaagctcaagcacgttgaatactaaactacaacaaaaattaataaacatgaaatgaagaggaggaaaaagcatcaccattgtcaatggagattcccattagtttctaaaggtcactttctcaatacaggaaaattctcaaacatgtatcattcatctctgattatgcactcattagccatcaagttaaatttttatccgtattgccttcttgttgtgctttagaagnnnnnnnntnnnntnnnttatcctgactattcttcnncnnnnnccctt

SEQ ID NO: 13012 - DNA, 661 bp, Gossypium hirsutum
caagaagtttcagctcattaaagctgaatatttgctgcccattcagctctctaagtgtttattcgactagctaaatgtttacctataaatagtttgttttgtaatcattttggggttagacaatttagacaatttagacaatatactttttatccctttatggatgtttataacattgtgagtttgattgaactctctttgctcttttaagactcagcttgatttatctagcctagccagtggcgtcaccctatttcttttgaacttatcactcctaaatcgagtgtggcgtgcacccttatacctttggttcctatctccttatagatagtgggtcaaggttctatcttttgccatctcaagtgtttttataagtctcaggtaaatactgtatatagtattagttcattcttcaaccttgagcctttctattccatccacattcatcgacttacatataaccttatttcttgttagctgaaaccatatatttatcatatctaaaatacttcaaaccctttttttaaagcctattcttagccaattttagcttactttaatccgaacgatacctcaattttacgttcgggcaatcaaaacgattcgtatcaacaccgaagcgagatagtattagaatggggaattcatctcatggtttaag

SEQ ID NO: 13013 - DNA, 651 bp, Gossypium hirsutum
ggccccaagatgtttttaggcgacagaaacgggcaagtcaactaaacatcattatttttgtccccacaccaaaagataatattaatctaacggttaataatttcccaatctgccaataaagaaaaaaaaaagctgctttctcaacggagactggcattattgccttttccttttgcctactacgattttagtatagcttggattgcggtagaagtaatgtaaatacaaattatattttattttaataaaaatattataaagatttttatgttaaaaattaaattatatttgatttaatatactaaaaaatagacaaattaatatatatacattaaattaaataataaagtagtcattttgttaaaaatttaatcaatttctattattaaaaattggtcaatggacgtcaacatgaagtacacgtggcacgtcatgtgcaactttctagttattctattagctacactaattttaacgatagaaatagatgaatttttttacaaaaatatcagtttgctatttaatttaacttataagaattaatttgcccattttttagtaaaggggcaatatataatttgactccttgtataggggcatccaatatagttttatcattttactcattttataaaaaaaagggagcaaatt

SEQ ID NO: 13014 - DNA, 498 bp, Gossypium hirsutum
  misc_feature (69)..(69): n is a, c, g, or t
  misc_feature (444)..(445): n is a, c, g, or t
  misc_feature (473)..(474): n is a, c, g, or t
  misc_feature (484)..(484): n is a, c, g, or t
aattggtgcattaaagaagtgtcttttggccgaatagtcacctagggaagtcatttgggcagcaaacgnttcatgtatcaagaattagatgcattctcccattcgttgtagcttgctgtccatgcatcttctcttaatctttattcatgaatagaatttggaaattaattatgcagctaccccttggccgaataagtacttaggaaacccaatagatctcccacatacattcggtcatgcatggaactaaaaggggtcttgaatctagccattcatgaacaaccattaattactctctatacatgcatgtgtgccgtcctaagggaatggatctttatggattcattgtaccgtccaaatggggaatgtatgacattaatccttatgcatgtacctaagccgtccatgtacatgtacataattcttcccaagaattgaaccaanncgtacatgtatcttctcatccattgaannaaacccgggngaattaaacccgtg

SEQ ID NO: 13015 - DNA, 400 bp, Gossypium hirsutum
tgtggttcaagcaaataaggacgagaagacctgcgctgaatgtgttgatctaaaatgcaactcaccaaaagattcagggtaatgactgacacctattctgtactttgaagctgaaatgtaatggtagcaaactatatgcttgtgcatgccacctcactggtgcatcgcggtctagtaaaactggctgcatcatttttaggagatttctgttgttttatcatttgcttttggactatttttgatcactacaccaaaacaggtttttaacggcgtttttttaggcctttagcggcgcttcttagtgccactaaaagtatttgcggcgctttcacaagcgccgcaaaaaacgcctctatcgacaacgttgctaacatttgcggcgtttttagaaataagagac

SEQ ID NO: 13016 - DNA, 674 bp, Gossypium hirsutum
ttgcatcccacaaaggtcgcaaagacaaactgcaagaacattactaaataaacgcagtcaaaagtcgtccttagaaacaaaaatgatccaatcaaatattagattggtgggaagttccagaaatgcccaactttcacaatcctaaaactcaccggttaaaattactttttccccgtaaacaaaaatactataacaacactaacatcaaatgaatttaagctcggagcagattgcaaatcatattattgtttatatcaatattgaccaaataatgagcggataaaataaatggcaccacttaccggtggagagacggcgttgacggttgagagtggcgaaggcattcctcatcgggcaaaaatcatagaaagaagtacgaaagagatcaggcacccatagtaagctctaactagtgatcacagttcgtttgtgaaaatgactaataagtcaccgaaagaaacgtgtggtccgggccggcttgcgaaacggttttttgcttcctactgcgggaaacattggcacgtaatttgtcttcctctctcatctcaagtcttaccagtcgacactggattctccggtctctgcatataatggatcagttttgaagaacatcggcccaactcccattttaatggatttagattctgccggattatggatgaggcagtgattga

SEQ ID NO: 13017 - DNA, 635 bp, Gossypium hirsutum
gaacaaattggggatgtaaactaagcctaaatccccaaataattgagccggtaacagacagaaattgcaatccctatcatttgtttgattgattggataacccaaaagggcccattacacattgaggcaggtaccaccaatgagaacccggaaaataataaaatggaatttacacgccaagtgcttggcttttgtcttcatcaagtccctaaatcctcaataacgcataacatttttttaaaatgtttatatattattttttgttaatttaaattttttattaaatttcatcattaatttttttaaaaagagtcaaattattttatttaacgaaaatactgattaagaaatcaattttttttaataatattggtgtggcaacttccatagaagtccacatgtatttcatgttgacataacactatttattttatatgttttataatatataaaattttaaattagcaattgtaaaattacactttgcccttcaaaaatgataaaaaaaatttgatttattttttttaaattataaagatataaactattaaaatgatgaaattacatatttactatcataaaaatatacaacttgattctgatactaaaaaaaaaattcttgcttcatccctagt

SEQ ID NO: 13018 - DNA, 461 bp, Gossypium hirsutum
acatctttcgtcaacgcctatttcttacaaacttagcacatgatcagtccccaaatcatgtcaaatccacttaaggatgcttcaataggacaatacaaccccccatcatatcaaaatacaaatgtgggaatctcaacatgattcaattactagctttccttgacgatacaccttttataaaaaattgtataaataaaacatattttatatttatttatatatttaattttttaaagaagcccaaataaagtgaattttttattgggattttacaatttcataatagaattcctaaaataatatatattttttaagttcggataatgagattcaagcaacaattatatgatagatacgatggatcaatactgatgggtgtcgaattcactaaaaataatattcttacgcctaaacagtaaataaatagtagtatagggagcaaagtcgatcccatagaaatc

SEQ ID NO: 13019 - DNA, 663 bp, Gossypium hirsutum
  misc_feature (562)..(565): n is a, c, g, or t
tttgttgtcccagaaagattccaaagcaaatttaagctctctcttaggtcccatgcggggatatccaacaatgtgagaggccatttttctaaacaaaaataaaagaaaagaaaaagttcaacattattacataaaggtacgtaaaaataacttagcatgcaactttagcatgcccctatattccaataagtgatagaattcagtatagacagaccaaaagatcatatgaattaatgtttggaaattatcatatatttctctaataaaacatattcatatgaaagcaagacaacttaggggtgtaatgagacacttatagttagaaggtactcgggtgcaactagacaaagattagaatttgataggtatttggtcgagctcgaaccatcaaatgagccaaactcgagtgtcctaatgcttcactcaagtactcgagactaatcgacctttttatatagatgagctttatatatatatcaagcttgaagtctaacatgtgactgtaaataggatcctaaggaatcagatataaatacaccgttacatagagaaccaaacaaannnnacgtcttaatgtcgaaaattaaaaactcgagaagaatttaaaatacgatcccttttaatcaatgttaattttacaaagatgtttggataaattgaagc

SEQ ID NO: 13020 - DNA, 602 bp, Gossypium hirsutum
ggcatatgcgtttaaggtaaggagtttgcaaactaaagttctgtgagcactgcatttttgggaagcaaaagagagttcgattcaccagaggaattcataacacaaaaggaacgttggagtatattcattttgatttgtgggggccatctaaagtgccttcgagaagtggagctaattatatgctaacttttattgattattttttttagaaaagtttgggcgtttttcttgaagtagaaaagcgatgtattttctacatttaagtcttggaaaactatgattaaaaaacaaaagggaaaacaaataaaacacctctgcacaaacagtgatttagagttctgttctgatgagtttaacgaattatgcaagtcagaagggatcgtgagacacttgacagttcgtcttactccacaataaaacaatgttgaagaatgaatgaacagaatgatcatagagaaagttcaatgtatgttgtcgaatgctaacttaccaaagtcgttttgggccgaagaagcctctactgtatattttttgatcaaccgatctccattcgttattattgagaaaaagactccacaagaggtatggtctggtaatcctgc

SEQ ID NO: 13021 - DNA, 395 bp, Gossypium hirsutum
ggtttgtttgaatgggtggtgtgtttacttgctgttagtgtaaagataacagtggcggtgaaattagatactataactatattgtagcgtgtgataaaaaataagttaaacgcaccgcaccgcaccgcacctcaccgtctatccaaacccacccttaatttaaatgttttcaatttggtaatgattaatctcaaatccaatgtaagtttaaaattttttgaatattttttaaaaaagtcaataccgtaattgatccctcaattttggaattttttctcatactgatatttaaattttttgttcacattagtttctagaatttgatttttttttccaatttgttcattaaatttgaatttcattaatatatgatgagatgaaattataggattgtt

SEQ ID NO: 13022 - DNA, 615 bp, Gossypium hirsutum
tgttgtagctgtacgttggattgaaatggacacaattacccttcaatacaatgttccctttcatgcctaatatttatctcatcttcattctaaattaaacttcctacttcacaatcaaaacttgaaaacactctttaattggaaaaactcctaaagataaaaactctatttttccattatggtttgaaatatatctaattacttttataagtttctattaaaaaaaatctaattagttatacttttttaattattattaaatttcatatattaaatatttttcaattaaaatatgtaggttaattttaaaatatattgtcttaaatgataattacattttcttttgtcttctcttttaattttttttatacaaatgcatgtaaatattttaaactaaatttaatttaattatatattatttctttaatttcatatttaaatccatttcttttccattaatttctttaaataatagtaattaattttagttaaaattgtaattacttcatatcaatgttaatatataaatgaattaagaataagtttaaaatacatgcttttacttagaacttaaaattgtcaatgtacaggatagggtcgaaacctaaagcctaa

SEQ ID NO: 13023 - DNA, 469 bp, Gossypium hirsutum
tgctagcatgccttgtattatgtgttcagcaaacacaacccaaaatgttaaaaactcacgatagttataaaacaaaattatgaattaccttcctgaacaagactcacgagaagcaaggaaatgaacatgaaaatcctccaaaagcctataatttttgcccatggttgaattctttcccagccacccaccaaatctattgaaattgcgttctccctgcaaatatgacacaagcattgaatattaggacctatctaaatttcaacaggaaatcatcattaataaaagtgctaaaagttaagcttcatcacagaaggttctactctaagcatctgaacaagaaaatgacaagaactttgagattttattcctaatggaggcaattttgtaaaagcatgtagtagcaatttccttgaattctaatgcatcaaacactgcctagtacatacagactcctgagaacaagtagcaa

SEQ ID NO: 13024 - DNA, 622 bp, Gossypium hirsutum
tttacataggacccacttacaccgatataaaacttaagtagttttatattttttcgtaatattttatgcaattaatatttttataatccaactgtcatatttcatacttgtcgaaaccatttttattttgaaaaaaggatatcgaatttaaaacgaaaatggagtcgccaccaatcttttttgtttaggtgtgatcgggtcatcttgtgatcgatcattttaataaagtatttcggtttattaaaacaacgtttttggtctacgaaaaactagaaaacggattcgggagtcagttacgcgcgaggaaggattagcaccctcgtaacgcccaaaattggtaccgtattgatcaattaacgtcctaatgttgaaaatttgaaaaagattttaaaatacaattcatttaaaacgtttggataactagaattggatattgagattctctcgcttagaaggaataaaatatcatatccaacacaatcggacacaacatttcaaaccctcgatacaagatcatcttataatttccaaaactcatgcatttgaaatttcaaaatgatatttggctatctggtcaaacggtaagtttaaacccagcacgattgggcacgatttcttaaat

SEQ ID NO: 13025 - DNA, 690 bp, Gossypium hirsutum
gtccacccgagtatttaatggtctaatatcaacaaaatgaccctacattataaaggccatagcaatataacactttaacaaatagcatgtaacctttacactttacgcgattaagtcctttttacagaattaaccattcaaacggtaaaatctcttcacgaaattttcacacaattctaatatcatgctgtaaatattaaataataataaaataaatttttctatgacggatcgtggtccagaaaccactattccgactagggtctaaatcaagatgttacaacctgtagagcctactaaatttgtaattagagtttcgaaccccttaggcagatgtgttttggttgataaagtctataagaattgttcgttaatgtttcgagacatttttttcggctgatctgatgttgttaccttttgatgaatttgatataattctgggtatagattggttaactttacatgatgctgttgtgaattgcaaatgaaaaactattgatttgagatgtaagaatgatgaaatagtcagaattgaacctagtgaattgaatggattacctgctgtgatatcttcaatgaaagctttgagtattgtgagaaagggttgtgaagcctactttgcttctgtgattgatttaaaagtgtcagaaaggaaagttgaattagtgcctgttgtttgtgagtttccta

SEQ ID NO: 13026 - DNA, 668 bp, Gossypium hirsutum
cctctaaatacttgctgttaaaaaaagcacttaaacaataaaattcccttaataaataaactctctctaaatacatcaaaaggcttcaaaattatgtccatgcaaaataggataaaaaacaatatctctaagaaatattttcaaattgcaagcctcatgcttggatcatgattctacaaaatttgctgccaacataaagataacactcgaaataaaactctcaagtcttttaaatgtgttacttcagataaatatcttatgttttttgttgatgatacgatcacaaagagaaacataatttactccgcacccacattcttgataaatttaaatatttttaattttaatttttagcatgatattatagtgaaatttcaaaaaaatattaataaataattaaattaatgcatactatcaactcgaataaaatactaatttatatataaagctattttacaaataaatattaataataatttttatttattttgcatattccgtggatcgaaaatgattataaaataagtaaaacattatataatattaaggtaaattatacaaatggtcacctaactatgtctatactcctattttagtcacccacctttaaaaatattcaatttaggcactaacgtttgaatttgttattgtttgtcactcgccgttaa

SEQ ID NO: 13027 - DNA, 625 bp, Gossypium hirsutum
  misc_feature (573)..(575): n is a, c, g, or t
  misc_feature (584)..(588): n is a, c, g, or t
tactcatttcctgcgttccgttcctccgaaattctcagtttaatttcataacttttgtacataatttacttattttcaacaattaacatacataaatattaatcaccattcataaaataatattgaaatttaataatattaacaaatggtcactaaatttagttatataaactcacaagttcgatttttgtattatagcgataatcataatttcataataaatattccaaataaaacattatatcgtttctaattcaacacttatcgattataatcgggcatgtgatcaatttatacacgagtcattcatatatttttgtatattttccccccccccccccccctccccatccttaaaataaacaaaacacttggaagtaacattatccataaattttaacaaccaacttagggaaaaatccaaccggccctctggatcctaaacacaaaaggtggttggggaaattttaggttatggtacctacaagggtgttgtttttactaagggtgtgggggggggggggggggggggaaatatataaaaatatatgtgtgtgtcgtgtgtatattgannncatgtgcgnnnnnattcgagatgtgtggagtttgaaacgagatattgtgt

SEQ ID NO: 13028 - DNA, 371 bp, Gossypium hirsutum
  misc_feature (58)..(59): n is a, c, g, or t
  misc_feature (61)..(63): n is a, c, g, or t
  misc_feature (301)..(301): n is a, c, g, or t
  misc_feature (306)..(309): n is a, c, g, or t
  misc_feature (312)..(312): n is a, c, g, or t
  misc_feature (353)..(353): n is a, c, g, or t
  misc_feature (362)..(362): n is a, c, g, or t
ctagagtgcagaatttcttttcccacaaaggcacaccatcattagaaaactctacgannannnaaaacataatcagcatagaatcgcacaccaccattttatatatatataatttgttaaaacatgaataaacaagtgttagttcttagacaatgtggatagttaaaatcaaactagcaaccagtaagaaattaggaataacatttaagtcgtttatcatataagtaggttcaccaagaataaacatacagaaacaattgatggttatatacaataatattccaagaatgcaccaacttgngaaannnnggnaactttttttttcatctacaaattaacagtcatcaaaattngttcactcnttaaaagca

SEQ ID NO: 13029 - DNA, 663 bp, Gossypium hirsutum
cgagctaaagacctcaaagatagctaaggagctttataccattaagccacaatgtttccttgtgttcatttttgcacaattaatttaagacataggagatggcagtttcactattttataattaatagtaaaaatgggatgtgacacagatcatcaagggcaactccatctctactcaaccgttataatttatatttatctattatcaaatgggcaaaagattatctaaataaaaatttgatcatgaccactctcgattcattaacccaatttctactaacccaatttttgagatgtgacagatatcgagtttcgagttggtgacaagctattcttgaaagtgtcaccttagaagaaagttttgaggtttggcataaagggaaagttaagtccaagatatattggaccttatgaagttgccggtacaactcgagagatttcacgatgttttccatgtgtctatgttgcaaaagtaccatttagatctgtcgcatatagttctaattgaagaagttgaaattcgtgatgattttacttatgaagaggaatcaattgaaattctagttcgtgaagagaaagtcttgcgtagtaacacagttttgttggttaaagtattgtggcacaaccacaagactgaaaaggctacttgggaagttgaagaga

SEQ ID NO: 13030 - DNA, 689 bp, Gossypium hirsutum
tttctggatctgtgactggctctatagttgttccctaatacgagtcatacacttaacccaaagagaaaatataagtaaacaaaataagaaaataaaatcatagctataatataaaaatttcctaattattttattagcatgcaaaaattaaaattaaatcaataaggttgcctccccgataacgatgccaacaacttgatcgcctccgaacataccaatttccagcgtaaaaatcctgcacaaaatatgtgaaaaggcggtatccactagtatactagtcaagttgtaatatagttataatggagtagatgaatactccgaggatcgttcaaaagaaaggtgagcactaaattaatcctaacctaaacagaaatagatttaattagtactttacactaattatattacgataaaataaaaagaaaggtttttctgatctatgttataataataataataataaaagaaagaacagaaacaaataaatcacgataaatcaaataatagaatatatcaaatctgggtatgggtgattagctcacttcggtaatcataatcaactgttgcttcaggttttcttattcaatcaactagccgatatcccagcaggacctttcgatcttttgatcttccactagaataacgagtcgacatgaactacttatatttcgaccttacaatccataccg

SEQ ID NO: 13031 - DNA, 373 bp, Gossypium hirsutum
gaggttggagaaggccaaacttgtgaaagtcttaagtgaggacaggggagaaggtccttaatacctcgtgtgttggagaatatataggggaaggtccccttgtttggcactgacaatatagatggtggtctactcgtgtggtccgtcaagtgacaagtcctttacatgccagttgttgtcaagaataatattgtgatcctgctctgacattcctcttgctgaggtaatatgagattcttatgtcctaatagtcctttagtggtccccgtaagcaatctgtaatgggtggccaaaagtgggtggcttgttggaggccaaaatcgaatggcttcctcgtgcatagcgtgaggcatgtgggtggtatgtcattaat

SEQ ID NO: 13032 - DNA, 649 bp, Gossypium hirsutum
accctacatttgtcacaattcaatttatttaataataataatattattattattattattagtattattataacaataatttaataaatatctatttaataattattgcctatactacaaatgtatgtatttttattaatacacttgtcaccatttaatttatttatcacataaaaatcttataatataattatttaattaataaatatcgtttaactttataataataagtaataaatatctatttacttaaataaaaagtaattaaatatttatgttacaattgtatacatattattattacatttatatttttatcaccatccatttgtcaaaatcatactatatttatcatataaaaatctaattattttataatataatatgttcgataattatttgaatattaatcgtaaattgttcgattgtccgataatacctcgtaaccctgttccggcgatggtttagggttaggggtgttacatcttccgttcaaggtgaatagttcctcatgacacgaaagttctggatatatggggaaaggtcattggttccacttgacttgttccctttcagttgcgctcttctcctttcttgcttcttctccagctctctcttcttttgcctcgcatctaacttgtatcctaaa

SEQ ID NO: 13033 - DNA, 524 bp, Gossypium hirsutum
  misc_feature (486)..(490): n is a, c, g, or t
  misc_feature (507)..(507): n is a, c, g, or t
  misc_feature (509)..(509): n is a, c, g, or t
  misc_feature (516)..(516): n is a, c, g, or t
atctcttttaacaatcccatatattcatatgtaaaaaaagctagcttgagcctttgaggtataaaggcaaactggtataaaatgactgcctttttttctcttcacacatgacagacaatgatcaaaggggttttaatatttcaatatctggtttacgatgaaataagaaaaaaaaatcttacaggggattggaatccttggttataagtattttttaaaattttacagcaattgattgtttgattttttaatgagatggggctcatttcttttttctgacctttcttgtgacaaacttttgccttcaaagtggcaatgatgatgttgaagttttttttttttttttaaaatttttgtggttttcccttcccttccccggaaaaaaagaaaaaattaaaaaaacccttttttttttttttttttttttttacccaaaaaaaaattatggggggaaaaacggacccccttttgtggaaaattcccccnnnnnaaaaaaaaatttttggntntaaaaanaaaaaaaa

SEQ ID NO: 13034 - DNA, 385 bp, Gossypium hirsutum
ctaaaatgagaatgattttatttttcacaatatttacatgaagaatacttgttagaatattcagtaccattaccttttacaacaatttctaaaccactatttccatcactcttcttctcattccacttccgatcctctcctcattcaccctactgaaccttagcttttaatgctccttctatgattctttcctgcctaattaacctcctttgttcctatgcttgtaatgcactaattgactctactactatcagttaaatcaagtttttggtgttctctaaagaagcaattgttgattcatatttctcaggcaaagaaactaatattttctgcactagtccacaattagagagatcagtcccgagaaaccttgcctggttagaaa

SEQ ID NO: 13035 - DNA, 526 bp, Gossypium hirsutum
gttggagaccagtttccaccgaatttgtttcaccacgttaaagttcttaaagtgaatggtggcttctgtggtggatttcctatatttcctttcctgagaaaaatctgcaatctggaaagtcttgatcttgagttttttagtttcagagatggactcccttgtaagggagacgttgggactccgtcacgaataaaaaaattgaacttgtataatctcagaaatctgcagcgtatgtggaggaaagattcagagcttggaaatattctttctgatctccaaacactcacaatttattggtgtcatgatttgatcaatattggagcctcctcattatcttttaaaaatctcacaactttaaaggtgtcaaattgcgcaatgatgacaaacttagttacacccttaatagttgagagtcttgtgcaattaacaacaatggaggtaagcgagtgcactaaaatgacagaaatagtggcacacgagggagactaccgtcaaacaatagttgttggtaaattgaaatgcttga

SEQ ID NO: 13036 - DNA, 663 bp, Gossypium hirsutum
tcatttattaatcaagccatttagtcacttaaatattataattagcaagctttacactgttttcaatttatccgtttttaattaattaactatcgaaacattaaaaattttcaactaaactttaataccacatttatgacactccgtaaatatttataaaaatatttacgactcggtttatagaaacgaggtcctgatacttcactttctaaaactatttgacctaataaatcattataaaatacaaattaccaattcaaaaacttttttaaaaccatatttgactagtaaatattaaataataatatttacaaacttacttgacatatttggtgtcctcaaaccactattttcgacaccactaaaaaaatcgggttgttccaaactatataaaaaaaattaaaatctactaaaattgcttgtaacaccccttacccgtacccgagaccaggacgaggtacaaggcattaccgaacataaacagggtatttccagaaaatacgggtcataaaatttcattccaaaaattaaaatcgatcaaacaaaatcatattgtccttatcacggacctacaaggttcaaaacatacattaaaagtaatctgggactaaaccgagaacttaggaaaattctaagaaaattcctaggtttaagctcacaagc

SEQ ID NO: 13037 - DNA, 679 bp, Gossypium hirsutum
gagttgtgtttggattggttcttgttaggtttgtacaagtactaaaattaaatcacatctttggtttgagtttgaattgagttaattttaaatctgtttccaatttagttcattttgagatcgaatcgttatgagtttagattatttggatttgatatttgatttcttgtgttgagactttataaggtcaatatcatttcgggtttaagtagtttcaaaagattaagataattttaaattcagaatatttcgagtttgaatcatttggagcttgaaatagatgagcttgaactaattgttgcacactacacatttgagttcagtctttacgatgagtaccacaacacattcaatatatatatatatatgatactagttcgagtttgaacagagtttcaagcgaattaaacctaaacatggaataatatgccaaggcataaaaataaggatttcaaaattggactattggttaaatcggttaggtctctggtttgtcaatccaatcaatgcatccagttcgattaaataaatcattaaaaatatttgaaaaaaaaagttcaactaatttttttacttggttcaaccaattcataatgattcttaagtcaatcagtctaataactttcttcaaattaataccccgatccaacctgttccacacgggttcaaatatcaatac

SEQ ID NO: 13038 - DNA, 506 bp, Gossypium hirsutum
tgcttcaatgttgttcctatttcgagacaagtaagtgtatgtctcgagacaaaatcctttacgtctcaagacacacatacttagatttttagcttcgaaatttgtatgtctcgaacacacatcaaatgtcttgagacctgggacaagggacttaaaatttctattttcaaacacatccaaaccataccaaaatcattcataatcattctagacacaaaccataactcatataccaaataacaccatatattactaaccaaaacacatcaaactcaagtttgggaatcaattagttccctatttacttacataaatattcatctagaaacatgtcatatacttaaaaaaaaatagtggagataataaactcttctccaagctgatgtgatgagatgtgaagagactgatcctcaataaatcttcagtttacatctttacctgtgcattaaatgtaatgcgataagcttgtgaaagcttagtaaatacaacgagaattaaacttgccg

SEQ ID NO: 13039 - DNA, 630 bp, Gossypium hirsutum
ggatagaggctccatgggcacaggacatgggcgtgtcccaagccacacggatgtgtgtgaccacacgccccaatccacatgggcgtgtcccaagccacacggatgtgtgtgaccacaagccctaatctacatgggcgtgtgactctccgaagcaataaaatttagttaagttgcccaaagattttcaaacttcttggtttagtcccgaaccacctcaatgtatgttataggttttgaagacctatataagggacgatatgcatgtgttcgagatgttttatttttttgtgataattttgtggcccggttttgcatgttgtgaatgtttaagtccggtaacacctcgaaccctatcccgacgttgaatacgggtgaggggtgttacaaagtttcagctaaagctcaatctaacaaaatgtactttcagagctagttcagggaaattgctgggttttatagtcaacgaaaggggaattgaggtcgaccccgacaaagtaagggctatacaaagattaccttcaccacgcactcagaaggaagttcgaggtttcctgggaagactaaattacattgcccggttcatttcacaactgactaagaaatgtgaccccatattttgccttctcaaga

SEQ ID NO: 13040 - DNA, 635 bp, Gossypium hirsutum
  misc_feature (598)..(599): n is a, c, g, or t
  misc_feature (602)..(604): n is a, c, g, or t
  misc_feature (606)..(609): n is a, c, g, or t
cttgtgcatacaaacactgtatcagatcatattagaaaacattggacaggtcttggagctgccattagctgtaagaatttcctttcatgtccatgatgttagaagttccaggtacatgttcctaacaagttccattcttgctggtggctctttatttctaaatttgatgcacccaaagcttcatttacatgaaatattagttgcctttccttaattgccagcctagaagctgaacaagcattgctaaacccatttaaagccaatgattatcgacgttccttttgttatagttggaaaagaagctgccatgattgatgtttatgatcttggttgtgctctctgcttacattgctaaactgagactgtcttttatgtcaaccagtggatgatatgatgaaaagactaaaagaaacaggtttgatctttaaccctttggtcaaggtgaaactaaaatgtctatacaaggtggttgggtggacttgtcaattccagtatgtcacatagttaatatttaaagtattatatttttatacatataaatttgtgttacaaatatttatgttggtattattgaatttcatatgataacggagcagtnntgnnnannnnacagacagtggtggtttagttacaga

SEQ ID NO: 13041 - DNA, 513 bp, Gossypium hirsutum
cataaagatacaaaccatttttggctttttctgaagatttgcaaatgtttgtttttatcagctatcaacataacataatattcttgtttccaatatatcaaaatgctgatatctacttgtattatcaatcggtttataatatttagatgttaggtttatcactatttttggttcatccaacaacaacaatataacttagagaatgcattcgtcttttcacgtcatttctcgagttagcacctccgaccatttgcatgtacccctatcatttatattaatattcatgtaatctctattaaaatatcttatttaataatttaaatttatgggatacaacagttaatttgatatttggaaaaaattatgtgacaaataacttgtcggatatttttcaagtcttattttagaactgaaaaaataaaaataaaaagaagtataaatttgatacagcatgtagtgtaccgtacaattggaggaaataaatacaaaaaacaagttgatggtgatgagagg

SEQ ID NO: 13042 - DNA, 693 bp, Gossypium hirsutum
cgtagtgccaagagagagagtcacctgggaattctttcaaactgagttccgaaaaaagtacataagtcaaagatttttggatgaaaagcataaagagttcttagaactaaaacaaggccgcataactgtaaccgagtacgagagagaatttgtactgttaagtaaatatgctcgagagtatgttttgactgaagagataatgggcaaacggtttgttgacgggttgaacgaagatattaaacttttgattgggatattggatttaagagaattcgttgcgttagttgagcgtgcttgtaaagctgaagaattgggaaaagaaaatagaaaggctggttctgaaactagagattcgagaaaaaaattgatgaataaaccctatcactcttcatcaaagaaatcttgagattcatataatctatcaaatgcatcagtggagtactctaatagagatcgtgggaagcaatttatgggttcaaacactccagctatgtcaatggcgagtgtaggtaatgttagatcgaataaacttgaatgtggacgatgtggaaaatgacattttgaagagtgtagactgaatgataaagcctgttttagatgtggtttgcatgaatactttattccagagttagatgagaaagatagatctcagagtgcaagacaaagcaacacgactgagagaagaaaccattc

SEQ ID NO: 13043 - DNA, 496 bp, Gossypium hirsutum
gctatgttttgagtccgtttgaattggaccaaaaaagtggaaatgctaaattgtgcaatcctcttgctttgatggtaagtttgatgtatctttctttttctttgtagtggtgtaaggccttttgatgtatctctactggttgctggatacgatgacaatggtccacaattgtatcaagtatttctcatagataatagttgattatatttctcatagaccaaaaataatggtcttcttaactgctccattttttggcattatttttgtatctcttttatattattagggttttgaatttttctaagctcgggtatatgtgcacaagtcatagaattttaaaatttttcccttggatcatgtttaggacgtgaaagcaattggattaacacagggtgatgcgactatggaatcttccccagtttctcaaacaacagatctgaggcctactttttcagataatgtacctaatctaggtaatggtggaaatgtttcggag

SEQ ID NO: 13044 - DNA, 546 bp, Gossypium hirsutum
caccattatgactccattgtcttcgttgttgagccaagaagacgatgacttgccacgaaagaagcaaatgaacaaggtgatgatgaagacgaaggtgaaatgtggataattagccattgaagggggaaatgagggaagggagtgtaaaattcacagcatagaaggcagcattttcaagtgctcttaaagttgtcaaccatagcttttcctttttctttctttcattgaggcatgaatggcggtaattaattatgagtggaccatatacatgttcatggaaagtaaaagtgctttctttttcactcattaccatttcttcctccttcctacagctattggtaggtgattcaatttgacattactgtttcttttaatgccggttgaattctagtttagttgacattgatattgttaccagtccagtaccatataggttcaaatatgtaaaaatatatttattttatataattttataattaaatttaaatttaaaatattttttattatttaaattaaattcagactggactgacttgaagtatgaaa

SEQ ID NO: 13045 - DNA, 598 bp, Gossypium hirsutum
  misc_feature (486)..(486): n is a, c, g, or t
  misc_feature (489)..(489): n is a, c, g, or t
  misc_feature (582)..(582): n is a, c, g, or t
caaaatacaaatataaatacttatgaattggttccgctactgtttgtctatgcatttgataaggaaattacttttctggtcctatttttggtttgtcaggttatctaatgttgtttcttatttgcagctagaggtaactttttctttttcctatgttttctgaattgtaggcacccagctaatatcactctcttgcgggggaatcatgagagtagacaattaactcaggtatgtgttcaaattatatcaccaaggaaaatgcgtgtcatactgatatagcgacctttttttttttgggggggggggaaaaaaaatggaaacctttttaggaacaaaaaaaggaaacccaagggttaaatttttgggggaacccaatttttttttcccaaaaccggattaatttgatttttaagggaaaaatttttaaaaaaacttttcaaaaattagggaatgaaagttttcccgggggaaaaatttttaccaagnttnagggttccataaaaaaggcccaaaaaaatttggaaatggtaatgcctggggggttttgaaaaaatttttttattttttttacctttccccaantttaaatgggactgga

SEQ ID NO: 13046 - DNA, 659 bp, Gossypium hirsutum
cgttcaaatggagtaaagggtcgtcgttgttttcgggcaaggattcaaggtcacaaagggggttagataagcatcaaacattgcaatcgttggggaatttgagtgtggattctactgtttctatgcctgctacgatgggaagaaagccatttaatagatttgtgtgatttgttgttcaatttgggtatttttttaaaattgagtgaatgatgatatgttgaatttataaaattttctcatgtaaaataaaaaagaacagaaactaaaggaaaatggtgctttgaatgttgaagactttaggggtatggagagatattatagtaaattttctttattttttattataattttgttttttgtgttagtagtaatatttagggtaaattgcatcgatggtaatttagatattagcgcgtttttgttttgatcacttaactttgaaaattttcaacttcgttaccaatgttatcaacattgaaatttttggtcactcttccattaaatcattaatggaatactgatgggtctttttttaatggcacaatagcaaatttaatcattaaatgtttttgtattctgttaatttgatcttaattttaaaaaattcaataaatttaacccttaatttttatacatcatgtcaagttcatccacttgtg

SEQ ID NO: 13047 - DNA, 600 bp, Gossypium hirsutum
aagatccgatccaaactcagtttttaaggcccaattacactctttggataagcaaagatgaatccaccactttttataccaagtgtgggcttaattagtaattaaaatggcttaaattagtaattaaattttaattttgttaacatacctttattttaatagttaaatttaaataaaaatgttaaatgataaatagtaatcaagccggatatgaattcgatggaaatagaagattgagtgagctacccaacctttgaacaagttcgactgcattataaattcggcaacaaaatgattcaatttctattaaaaggttaacgtagttagagccgaataaatggttagatagttaaattttcgaatcccaaattaattgctttaatatcaaaataataaaaaagttaagaaattgataatatatttatttaaaaaatcaaaggtgaaatgaacgaaaacataaagaaaaaaatttcaaaatctataatcggtaagggtcatgccttttatatatatatatatatattattaatcaatggttaaattttaattttaactttttagattaataaaaattatcaaattttaattttggtccttatc

SEQ ID NO: 13048 - DNA, 618 bp, Gossypium hirsutum
taaccaaggcaagtaagatgttggggctagtggaagcaaacaaccaactagcactatcttgttgtttatacgctagagagatcagattctcaatcttattgccaaattcattcactaaaatctcttgaatattcatagcacttttaatgtatttgtttaaataatgacttacaacaatgaagtaaacttgttgtcataacaagtaattaatctagcaatatcataataatcttattgtagaatgggttggtatcttgagttgcaaacaacatttgagaatcatcccctgattgcacactgagtctataaatgttataatttagcctaacaaatgaaagtgatgatcttaaaatcaattctaacaacaagcttactcaaaccccaattcaataatttctaattctagctctgatactatgatggataacactcaaacaatatgaaaatataaaaaatatacaaaaaaaagaaaagaaatgaagaaagaacaaaatttgatatatttatctttatttgcaaaactgaaaatttgtttatacaaatattcgtatttataactcaactatcacactcgaactattatgaattaactatcgacaacctttaacaaacttactg

SEQ ID NO: 13049 - DNA, 529 bp, Gossypium hirsutum
  misc_feature (48)..(49): n is a, c, g, or t
  misc_feature (243)..(243): n is a, c, g, or t
  misc_feature (290)..(290): n is a, c, g, or t
  misc_feature (295)..(295): n is a, c, g, or t
  misc_feature (309)..(309): n is a, c, g, or t
  misc_feature (311)..(311): n is a, c, g, or t
  misc_feature (430)..(431): n is a, c, g, or t
tatgctctagagagcttaatatggattacccgtccgggctaaatccannttataacctaagctcaagagggcttacattagaattacccgtccgggctaaattctatctgcaacatatgcactattattcttaacccatcaaaattcaacattcaaccgaaacatgataatttgtccatattacacaacttaagactatttcattatgtatatatcatctcacacatatcaacacaatcacanactactcatctcgaatataaacatatatttttatattacaaacactnatctngaaaaaggggtgtntntaattaattaaaaagaaaaaaacttttttgctcccctctagatctttgtggggggggttttctgagatatatgggaaaaaattaaacttatactctatcatattttataaatttacgtnncataatacaccataaaaaaaatactcttttcccctctatctttaaaaaaaattttgattccccccgaagccaaaaaatatgatttacaataatacccc

SEQ ID NO: 13050 - DNA, 512 bp, Gossypium hirsutum
gcttctctagttcaaaggaatacggatccctggggatccgtttaaagctgtgacggagactggggtgcacttgacaccactgtcgctcgcaggtcggcccagagaagagagagggtcaagaggattttaaggggaaagatttttaagattttttaaatctgccaaatgaaagtttttagggtaaattttagtttatatatgtgtttaatacggtgtcgttttaagccgtaagatttggcattgaagcggcgtcgtttcatggcacggcctgtgtgcgtgacccgacccgaggaggatctgcgtgttttcattgtttttggggtatttaatcccttagtccctctgctttttctaccttcttcaatcgggtccctttcctctgctttgtatttttaattttgccccatgacttcggcctttgattcattttggcccgcgtagaaatgatgcgttttgtggccttggaataatttcccgatcagtcccccgtcgttctttgcgtgttcatttag

SEQ ID NO: 13051 - DNA, 657 bp, Gossypium hirsutum
gcagttgaacgtttgagaaatatgattgttatgattttggaatgagcttaattgtttggaaacatgcatacgaatgtatttctggaactacctctgaattataaatgtggtaaactttgttaaatcgcccatttgaacgtagtaaacgattaggatacgattggcataccaataaggtttgtgaaaaataaaataaaataaaataaaataaaataaagaacacacaaattttacgtggaaaccctttcgggaaaaaaaccacgggcagaggagaagaaaattcactatgtcgaaaaatttgaatcaaatacaagaggaatagactatgtctatttataggcttgcaaagccatattctagtaggattgaaacaccttatcctaatcaatataaaatagatggagtttaataaggtttaaaaaccttattctaaaataaaataaaagaagtctagttctatatggattttacttttattttatttttcgtcgtattttatttaaataagaatttgggtctcttaattctaacaatctccaccttgacacaaattctcaatgaacaagttcttcatcgcgaactttcaataaacaagttctcctcttcttccataaaacctcttaagggtttaacttcaacaatgaacacccaacaaat

SEQ ID NO: 13052 - DNA, 581 bp, Gossypium hirsutum
  misc_feature (36)..(37): n is a, c, g, or t
atcctaaggagcactagaaaactaattatttatttnngagtcaaaatctgttattataagcataaaaaccgtcagtatagactcataaaacttacagcgatggtcaaatggaagcctttagtgacactaggttcaatcggtgtacattttttgatctatactgacatctgttaatgaataaaagtattgtccactgtctttactgtcgccatttttaataaaccttttactgacaattttgtcgctgtcagtacattactatatgattttctgacgatcatttacaggcaaatttcgtcaaataatttagaaaatatatacaacatttatcgatggtttcctttactaattttgtttaaatttttttttaatatccattggtataatttaaaaatattaaaacaatttatattcttaatttctaataatttttttcatgtatgcatttttcattatgaagattaattttattaaaatactaatcatttaaaagcactaaattaaaaggtattaagtatgatattttgaattattaattatatttttttaattaaatattaattgtaatttcatttgtgtgc

SEQ ID NO: 13053 - DNA, 694 bp, Gossypium hirsutum
cccaaatacacaacgagtttctctgcaaaatatataaaattccttagccatgttcaccaataattaaagatctgaatcacagaaagttatttaaaaaggggccaatctctacaacacgaggatgcaaggagccaaaataactacaataaacaaacattcaagggatttgaaaacatatataatagaacccagtgcttaatttacaccaccaactcactctccctgaggtacctttttgtcagagaaatataaatatttttgtctattttccaagctcacgccaacaagttggacatgcaattcaataccaacccctcccaattcttaaagaaacaaaaatgaagagaatccaagaacacaacttcaccaagggaaggaacccgatatggtgaagtacgtaaacaagaatcaaatagtaccattaaacaaatcaaaacctcacatccaagaaaaaatggggaaaaaggggaacgtggaataatcaaatattgcaaaataaaacatcaaaaacttcaattgcattggcttaattttactacatcttaaacggagagggattacttactgccaagataggtagcaagagaagtgtagagaaagctatcgtcatggccaatccgagacattgaatttagtcttctttaatacttcaattccaattttacaaacaaatgggattagcttgctattcaac

SEQ ID NO: 13054 - DNA, 656 bp, Gossypium hirsutum
taatgttcccggtttggtcatgaaccgttttaattgcatgttttagggtctcgagggccctttttagggacatattgaatgaatgtaaaaaaaattaattttaaaagcaaattttatgccctgaattagtaagttaagtcaggtaacgcctcgtgctcgactccggtgatggtctcgggtaaggggtgctacacttcttgcccataaggccgaatacacatgacatatttacacatatacttttcattcatgtcacacatgcttgtgactaatatcataacactcacttaccttgttgcaaataaatactaaagtaatacatacctaatcacttagctaactttacatatttgttccccacttatcgatgcccgatgaaccattcggaattgggtaggacactcggataatgacacatgtatcgtacaatgccaacgtcccagacgtggtcttacatgtaatcaaatatcgatgccactgtcccaaacggggtcttactcatacacatatgtcagaatcacatatcgatgccatggtcttactcgcacacatatatttggatcctatgtcatgacatatgtatcctaactattcctaaggttcatacggggctttcggacgtcgtaactcggtcgaaacgaactcggaatgtaata

SEQ ID NO: 13055 - DNA, 548 bp, Gossypium hirsutum
  misc_feature (542)..(542): n is a, c, g, or t
aaacctaaatgttgtagacctcagtatagagcaatgatttccacaaacaaagaatggattttgtttttgtacactagcaaagttcacatagtttgtttctgatactaatgatagaacatgaagcaaatagaaagggccaacatatctatacaaactaagatgatggtactcaccttctttcaccagcaaggttaaacaacagaacgatcgattgaaagaactttctttgagacaaacaaaatggatgaatttgtcaaaaggaatcaaaccacaatcagattgaatatcacaaggtttcttacctgacttaccttcgaatttttgaaaggtaatcacatcatccaacttacctttttaaataaattgaaaacgtcgtgtgtcggaaagataatgaagttggaaccagtctgtgggttgaattttgcaaacctgaaacgaagaagaatcaaaaggtaattctgaaagggggttagcaacagaattcctctcttttttgtgattactctctgatgtgatccggctcgatgatgtgtcgagtcgtngatgtg

SEQ ID NO: 13056 - DNA, 698 bp, Gossypium hirsutum
gagttcgttgtagaataggcaaacacatttcctaaagataccacttaggaaccattgcagcaactacaggccacttttcctcattttgatccttgaggacaaggatacttttttgaaagcagtatttattacggggtttaaggaattaagaaaataaaactagatgaagtaaacggtgcatttaagggatgattcgatgaagcaaaaagcgtagagttttatgtcagttaaacggtgttattggatgagctaaatgtaggaggaagttttctatcgaattaaatgaaaaaaatttagttaatcgagtttttgaattttattttattattttaatttaatttaaaaattttataaattaagttaagtgagataaaatttgaatcaaatcgaatatatttgttcgagttaaatttaaaaaatgattttggtgttatttatttttatgtatttttaaaaaaaatattttttctttaaaaaattttccctggatttttcattatagcgattgggggtttgaatgaactgatgaataggaagaatagcttagggtttaattagggtttaaaaaagaagaagaagaagaagaagagaataattgatttagggtttaagtatgtttcaagtttgaatggagaagagaatggacggtggaatcatgacttttgggaaaattgggatggtgaggttgggtaagattt

SEQ ID NO: 13057 - DNA, 652 bp, Gossypium hirsutum
ccagcatcaatagtttcacggtagactgtcagggctactgacgtcctaaaaaacaagtgagaaaccaactttagttatcaccaaaatttttagtagctttccagtaaatatagaaagtggaaatcagtctctttcaatcaaaacaatttttttacttattgagcatgaagttggaaaattagcccaactccaccattcaggtatcacttacaaaataactcaaagctaacacaaccaaagtaggaagtatagtatccccttaaatgtatgataaggggaaggattacaacccttcccaaacaaagaaaaaaaattggcaattcttcagaatctctattaagatcaatcacgacgggttcaattaacaaatcctttcacttgtcaaaggaatcatgtaccatttgttttcaatatgtggtcgtcctgaattaaaagacagaacaggctcaccaaccgcacaagctttcacaaaccttcgcaagcacatgcctacaaagagaaatattttaagggttattataaggtcattgaagactgtgtgcgcatgtgcttgtgcctgtgtattcattataaaattatcttcaaatacaaaaagcataaacatctataaaatcaattctttttcaaataatatggcacggacatgaagcta

SEQ ID NO: 13058 - DNA, 437 bp, Gossypium hirsutum
ttcctgggggtactccatgcacgcatcattaaaatcgtcataacttaaaccgagagttaaatgaaatgacaagtatctcatcatcatgatgtaatattaggtcactaaaactaataatccattaaaaaccttctgaccacaacatatttttcatatatatagcaaagacgacggctaccctagttgtgaaaaagaaatctaaaagtttctatttttggtctaactaaaatataccccaaattcccaaatcgtgaaataaaaatagaaacattattattagttaaattataagactttctagaaagagatatttttagtgacgatatggtggataaagattcatgcacttacctcgtcgctgttaagtcacgtgggaaggagtgtggagtacaattgtttggccaaaaacatgttatatgccaatgccaccatctaaa

SEQ ID NO: 13059 - DNA, 459 bp, Gossypium hirsutum
tgcccagtgctagctagttgaataaaccgacaaatgtgtgcccaacactagtcaaataaactgatgaaagttgcgcccagcgctagtcagatataccgacgaataatttagtgagccagctctagttggataaaccaacgatatttgcgcccagcgctagtcgaacgaattggagatgtcaattattcatttacaagtccaaaatttttacttttcataactcaatatcaaatttcataaattaataacacttccactccaattatctactaatcatacattaatttattccataatgtcacattccataaacctccattcaatttaattaacaattacattagggatatatatattaaggcatcaagtagtatctagattaattaaaacaatttataaagtttgagtttagggactacgaacttaccaaaatacgacggatgtctactctatgatatt

SEQ ID NO: 13060 - DNA, 546 bp, Gossypium hirsutum
ctcttatgtggatcacttgagcatgtagatggatggtttccatatatctgttatcattccataaaagccaaatacccctaacaaaaccaatagattcaattcaaaatgaattttgatatcccagtctgccaattatatcaccagctttattttcactgatctgggtttccagaagacaaaataaatcaatataaaaaatctcgcatttattccctcacaaaattatgaaacctaggatcaccagtacgcatgcaattccaaaacataagtcttgtgtccataaaaaaatataatggtaacaagttaacaaaaaataaatcaaattaccaattaatttttgcttgcccgcccactgtttcaaccaaatcctcaaccaccattgcttcttcagtagcttgttttcttagcttgttgtcgtccatgttatcaataatcctgatgttctttgtaagtgatatgaaatctgttaagtgttgaagtaaagggtccaaatctatccccggctatacgtctatttctcgggggctcacctacgtacctttgatt

SEQ ID NO: 13061 - DNA, 693 bp, Gossypium hirsutum
gtgcagtcgtggaaaagacgatgttgagccatgtcacttggcgttttgccacacttttcttttctttctttttttctttcaatcttatagtatttgcatttttagtcggttaatgttgtgtggtaagttgggctatggtgaaaaaaacataagtgttttgcaagaattttctttttggagaaagagaggtgaaactttttttattaaataagagaagaaagggaaattttgtgagagttttaacaaatcttccaatatgatatttgtacttttaatttgtccaatttaatacatacacttttattttgtgtattatcttattattataatctaacaatattaatttttataagaaattaacatgtaacccactaatagagtgacacatgataggttgggctaaataaaaaatttcttttatcattttaaaggtcaaaatcactaaaaagttcaaataaatatatattcaaatttattttaggctaaatttggggaaaaagccaattttttttaaataattagctttttaaactttttgttgggatatttagggaagtaggttaattttggagagagaaagtgaaaacgagttcagtaagacgcgttttctgtaagacgcgcttgtgtggctgaaagagcgtcctacctgtcagttgaaaatgtgtcctattggacgcactcactttctctcaa

SEQ ID NO: 13062 - DNA, 626 bp, Gossypium hirsutum
  misc_feature (35)..(37): n is a, c, g, or t
atgcatataattatattttatttgaaatcaagctnnngagttcattattcatatatatataatgtattattaaatctaactatttatatttaaatatgtgccaaatataaatactcgaaaatgaaataaaatggcctgataatataatatatgtgtaagattagtactgttacttttatgtttataatatcatttttgataatgtaaatatgtggaacataaaactatatcctacattacgtccaaatttaagtaaccttcaatatttgatttcatgtattttttttttccctatagatgttgaacaaatgctggtttccaccctatgtgagattcattcaaatggccatccagttaccaagacaagcatcaccacttgtttcattattattattattttcttatacatcaattaaattataaaatgtacctccatctttaacccacattcactcaattagtttatttttcactgaaaatgaaaaatatacgggggaacctatagctattctctcttgcatggtttcaaaacaatgtcctagtcaatgcttcaccagcaccacctttttttttcccggaaaaaccttttaaatttccttggccctggaattttgggaacccgcttt

SEQ ID NO: 13063 - DNA, 614 bp, Gossypium hirsutum
  misc_feature (574)..(582): n is a, c, g, or t
ctattcagatcaattctggtagtttttgttttatgtttaaagatttatatggcatgtatagagtttgaatgaattgaagtaaagatgttatgaactagttaacaatatttgtactaaaacagtttttggtaagtagcagtagtttgactttgaaaattcaccataaattgtggaaattgagttaagggctgggaaaaaaattagattaaagcctaattagtctagtttcatataaaggaaacgatgcatgcaattggattttatgttatgagatatttaaattgtggtgagacagagtctgaatgactttgagttcccctgttctgattttaaaaaatcattaaaaattgaaaaaaaataattataagtcatactgtatatgtatggattcctcattgggtctatttttaaaaaaaacaaacggcatggttatttgaattttttacagagataaatttggttcgtagtaaacaggggtcaaagtagccaaaccctgaaataggggaggatttaactaataaactgtactaattggaccaaccaaaaattataaaaaaaaattggtaagtaaatnnnnnnnnntaaattcggggaaaatttacggatttaggttt

SEQ ID NO: 13064 - DNA, 547 bp, Gossypium hirsutum
  misc_feature (61)..(61): n is a, c, g, or t
  misc_feature (539)..(539): n is a, c, g, or t
ctcctctcttctaacctaaaataaaatctcatagagttttggaagcgattttttccctatnatctgagatctcacttcgtcaaattctttatttaaaccagccagaaacaaataagctcgttcattctcttctttttttataacttttacaccatctccgggacactcccattcatcattataacactgatcaagttcttgccaaagagacatcgtctcgtcataataaaaagtaacttccttttccccttacctagctttccaaagttttatttttaacttaaatatatatgaagcgttttctaaatctgaataggtgtctttcatagcgtcccaaacatttttaatagtcaggagaaaaaaaaaagggttaacctacgaaggctttcaggaaataaaaaacccaggaaattatcataaaattttttgaccccccctggcccattttggaaccccccccctatggtggttggatttctcaagtaaaaggacttacttggtcgggccaatcattggcaaatttaaagaacagcaaccantcaaaaaa

SEQ ID NO: 13065 - DNA, 597 bp, Gossypium hirsutum
tcgataaaaaaaataaattttggaattaaatagttcgagttatttgagttaatcgagttattgggatcaaatcaaataaaaattatcaaggtttttggtttaatttgaatatgaattacacaatcagacttatccgaaaattcgaataaaaaaaaggtaaaactacgttgttctgataaatgtttatcttttctaaagttaaaagtcaaccattaagttaaaaaggaaaactacgtcgttttgataaatgtttacccattaagttaaaagacaaaactattatattgtttatatagttaaataatcttgtacttcatctactagttaaataatcgattcatataaacgcaacattgagcataaaaaataggatttgttaactcgactcgaaaatttttgacttgattcgattaaaaaaaatcaaattgaattcggttgctaaaataagatttgtcaacttgactaactgaaaatttttttaaaacttaattcgactcgactcgactcgactcgactcaatcaaatactcaccctatatgttaatattaagcttcaccaagttatcctcctgaggctcccaagtgggttagtgattta

SEQ ID NO: 13066 - DNA, 630 bp, Gossypium hirsutum
agtcggtgaagttcatgtaagaagaatccaaaccctgaaatggtggtgttggagcagcttggctgtaaacaagaagattattgtagtcaaagaacgggaaggttgatgagttgaatccttggaaaggatcataattatacagtgggtcattcttttcatttgaagacgacatataaacaagaatgaagaaattagggaagaagaagatgaaaatgaagaagagacggagtttgattaagaaacttttttatttttttataagaaaataagtgtttttcgttggtaaaatatcatgaggcccttgtattaagagttggattctactttgttctttatatttaaaaaatggataaattagtccttatctattagatcaaagagtaaattagtccttttgtttaaaatttcatccaattctactaataaaaacttatccatgtacctgtacgttagcataagatgcatatggcatgccacatgtccctgtttgtttattctgtcaatcatatgccaattttttaccatacaaatggatggaaattttaataaaaatgactaattgctctttgatctaatttataggggctagtttggccatttttgcgtagaagaggcaaaatgcaatctgac

SEQ ID NO: 13067 - DNA, 693 bp, Gossypium hirsutum
tttttaaaggttattcgatgtgggaatgtcccaatttccaaccataaataatttaaaggtataattaagaaagtcaattttaaactttgttatatcaaattacattctcttttaattttgctaattaacaatttaatatttatgggttttttaaatttacaacccttaaataggaggataaacacacttcaatatgtttaaactcacgttttcctatgctaacaatgttgtcaatgctaatcgagctaaaatttaatcagcttgtgatttttttaaaatttttttactgaagatgtttaataataatctttagaaattcattttttaaaacttataataatctttaataataaacgtgcaaacaaaattctttccttttttttggccttttatcttttacttttcccatcatttcattttttttttcatcttgaaagcactaaaaacaatcgttggatacataggttaggctaagctacagtgcctcacatgtgtatcttgtttttataatttttaagggataattaatttattaatttttggtcctttaacttagtaattttgtttactttgtcacttatactttctttttgtccattttaacatttaaacttaacaattaaattcattttggtccttgaacttacaaatataaaagtttgatgttatcacacattaaaattatgctgcatg

SEQ ID NO: 13068 - DNA, 665 bp, Gossypium hirsutum
gggctttaaaggtaaacttggtgaagatggtgcgcgttggtggggtaaatgaggggatcagtagcgatgatggctaaattgtggtgcttgctggaaattgtgcgcgaatattgcgcatattttcttaactgtcacacgctaagtgtaactgaagcatcaattccccttttataaaaaaagaaacttgggactgttttgggtgcttatctgctttgtaagaaatctctaaaacgattttggttaaatatagatttggtatttttctttaaattaacataataaataaaataaattgtattttaagaatattagattggtttttttagagtatacgtaaggcatttttttaaaaggttttgatttcttatataacaacaatgggttatcaatcatataaaaagaatttttaatttcatatttttatacaatgcgttattgattttagctggcggagtttcacatagtcatttgattgaaatgtgtcttatccataatttattgagtcaaaattgaaatgtccttgttcgtcatattccgaggttgcaaaatatagtaactgatcatatggccaagtgtatgacgactaattccacagaaattcattgggttgaagaacccccgcaatcaacatgaagtttaattgaggccgattacattacttgatt

SEQ ID NO: 13069 - DNA, 568 bp, Gossypium hirsutum
tgacattatgtgaaatgatgatgaatccctataccatctattcagggcatgttccttctccaaagttgtctggtttggcacttaatggacaacacgcatgaaacatagtgggatctttgatattagggaatgggtaagccaatagatttatgattaccaccaatctgatcctagtcaaaaatccattaataatggttggatcttagttttgtggcatatctgggaacatagaaaccaagtatgctcataacgcccaaatttagtacttagttgattacttgatgttttgatgtcggaagttgaaaattcgaagagaaattaaaatacaatccctctttgcataatattctttttaattaaaattacttaactaaattaaaacttatgtaaaaggccttattatcttgaggtaaccaaaacgaaaatgtcatgtcctgtaaattagggcacgacatctcgaatccataaaaataatattgctcattatttaattattatttaaatctcatgtgttttttagatttaaaaagatgtttggttatttaggttcaaagagaaagtcaaaccc

SEQ ID NO: 13070 - DNA, 540 bp, Gossypium hirsutum
tgatgtaatggctgatatgtcagcctattttgtgtgtaattcaagttaacaattagtcacgtattagtgggggcagttaatctattaggtaattgtcaaattaactttgtaactcatatatttttcaatttttgaatgaaatgttatgaagttcttcagttacatttttgtgcttggctgctgtttttctttttctgtttttgcttctatttcattgcttctgttttgttattttacttttgttttaatgtcaatgttacaacaaatggtaatcagagcctgtcatctttgagggcctctgttgttggttgtgtttttggtcaaaacaaagcttggagaagaaagaaattgaagctgtaggatttgttttagcaggatgagcttcacaccgcctccaccacctgtgttcactggagagaactaccacatttgggtaattaagatgaaaacatatcttcaggcacacgatttgtgggatgtgattgaaaatgacatcgaaccacctccattaagagcaaatcccaccattgctcagataaa

SEQ ID NO: 13071 - DNA, 517 bp, Gossypium hirsutum
gattattaattttgattgttaaattaacatgttttgttaagtagtgtttagagaatttaaggtttagtgattaaattatttaaatggtgaatttcatctatattttgtaaaaagaaaaaaaaatgtggattgatatgagtatattggatactcgactaacatattttaggtaaaaaaaaaaggtgaaatttcaagttatgagcttaagaactaagttgtgaaaaagttaaaataggaggggtaattttgtaatttcatgataatatgacttatagattgaattgaataattgaggttatttgaagtacttaattgaatgaaattattatttagatcaagacacacaacaatcggacttaaatcgaggtaaagttaaggtgttggattagttttcgactttgttaaaacgattgtgacatcgaggtaagttcgtatgaattataataatattaattatagttggtttgattatttgttataatatgttgaatataatttgactcgaaaatatcacaag

SEQ ID NO: 13072 - DNA, 438 bp, Gossypium hirsutum
gatttagtctactagcttggttttcccccggtttaagtctgaatttcgtatttcttgactataatgacaaaatttatttatttaatcatcacattaatcaaggcattccaaaattcctactttggcaaaatgactattttacccttagactttaacaaagttacgattttgcctctaggctcgtaaaatgattttaatcaaatttcctcctttaacaagcctagctgaacctttattactcttatagcaactcaaaattttcaattatttcacacatttacaacctattttataaacttcacaaaatggtccttttatgtgttttcatgaaaacacctttcactaaagttgtttatttaacaaccataattcattttcttccataaatactcaccaaacatcacaaatactctcatggtaaacctctagagtatcaac

SEQ ID NO: 13073 - DNA, 647 bp, Gossypium hirsutum
gcctctgtttggatagcagcagtaggctaatttttaaaaatcataataaattgtggaaatcgaattagagaatgaaaaacatatgggattaaagatattttagtctagtttctcataaaagaaacgaagtaagcaaaagaatttcatattatgagatatttgaattgtactgagatagggtcagaatgatttcggaatcccctatccggaatttggaaaattattaaaaattgtataaaaataattatgggttagaatttatatgtttaaaatcttgaatgagcctactttcaagagaaacaaataaaaacatcattcaaattctgtacgagaagataattagtttttagtgcagaaaggtcgaaactgtcagacaacaaaacaagggaaactttaaagaataaaatatacttattggctaaaccaataattctgaaaattttatggtaagaagatatatgagtctagtttcaaggaaaatttacagatcttaatccggaattatgtagcttaagatacaaataatttagtaatagtaactcaagtagacaactttgaaggatcatataagtaaatagtggaaacacatataaataattaactagcacgggttacattaaaatggatcacgaggccaatgccaattg

SEQ ID NO: 13074 - DNA, 692 bp, Gossypium hirsutum
ggtaatgctccgtaagcctgtgccagcgtcggatacgggttaggggtgttacataaataatatatttgcctaaaacatatttagtatcagtttctgttgttgttgttgttgtgttaaattaaataataaatttgtgttgttaaattaatgtttttcatgattgtttggatttgatttagttcaaaaatagatatgttcctctaatgcctctcaatttgattatggaatttgaaatttttcagtactcaaacttgtgtggttctaaagatagtttttgaggaacatctaagttgattttttggttgattatattctagaatttcaagtttaattgttttcatttttaattcttgaattattttagttatattttttttcatatacttacaaattagaattactatattaatttggtcattgttatttctatggacctaatttgtattaactgattgttgtctgatatgaaacatgaaaaaactagtgtggtttgattttgcaaatgccttatattttcctactatacgtccttgagatacttgttacttttgtagagttgttaaatgcagtagttcatatgttttatattattacatttgttaattatttaagaaatgacatgagcaattgtaaatgaaatgttctataaacatgaattgttggattttgagttgaatttcatgcatgtctgc

SEQ ID NO: 13075 - DNA, 662 bp, Gossypium hirsutum
gatcgttatagcttaacctagctagcgcggggactaacttgcaaaatgattttaggtttttgaagtttaatggaagaaaatgaatctttgttgttagttaaacaacttttgttaagtgaattttaatgaaattgtcaattaggggttaatttgaaaaatgtgaaaattgtgtgttaaatgtgtgaaattgtgaaatgcatgggcttctatgagcatataggatatttggctaggcttagatgtggtgaaattgcatgaatttcatttttacgagcctaaagactaaattgtaaagaagttaaaagtgtaggggtaaaatagtaattttgccaaaacatgaattttggattgaatagaatagaataaagattaaagtagttaaatttgattatatagatcaagaaaagcaacgtacagaattagatcgaggaaaagataaagtattggattgaacgatcgttttctgtcgtacgtgttcgaggtaagttcgtgtaattaaattgcgtatttgtatgatttaattgaatatatgtatatgaatggtttaattattttgtataattatcaagcatataaccgacgacgtacgaagaatactgagccccgtttgaaccttaggaattcgtaggatacaaataacatgtcattagggttaccgattc

SEQ ID NO: 13076 - DNA, 682 bp, Gossypium hirsutum
gaaccttgatgaatctacttccatatggaagaaatgaaacggtcatatgagtcatattgcaagagatatctaagttttcgtgggacagggccagagcgttttctgggtcccctgatctgactttggaaattcattataaattaaccagagataattagaagtcattaaatttatgtatagattcctttttgagtctagtttcattagaaacaaacatcataagtattgaagccctgtataagaagttatctaagtcgtaatgcaggaaggtcagtgtagtcgaaccctgtaacaggggagactttaactactaaactgtactaatttgcttgaccaaaaattctataaaaaattttttggatggatatatgagtctagtttcagggaaaatttacgaaactgattttcaagttttggaactcaagatatgatttttaaggtgacagtgatgcagttagccagctgtctggaaatttttaaaatggactgtgaacatacatgaattatgtctgttagcacctcgtggtcgcttccgacaacggtctcggatacggggtgttacatcttcaacaacctctcaagccatccatccactataaattccaactttcacttcacctttcaacatccctcattcatatctttcacattctctcatctcctctcctctcctttacaagat

SEQ ID NO: 13077 - DNA, 739 bp, Gossypium hirsutum
  misc_feature (79)..(80): n is a, c, g, or t
  misc_feature (98)..(98): n is a, c, g, or t
  misc_feature (202)..(202): n is a, c, g, or t
  misc_feature (211)..(212): n is a, c, g, or t
  misc_feature (215)..(215): n is a, c, g, or t
  misc_feature (262)..(262): n is a, c, g, or t
  misc_feature (302)..(302): n is a, c, g, or t
  misc_feature (307)..(307): n is a, c, g, or t
  misc_feature (355)..(355): n is a, c, g, or t
  misc_feature (371)..(371): n is a, c, g, or t
  misc_feature (375)..(376): n is a, c, g, or t
  misc_feature (379)..(379): n is a, c, g, or t
  misc_feature (396)..(397): n is a, c, g, or t
  misc_feature (435)..(435): n is a, c, g, or t
aaaatagtaggaatgtaattaaatagtgaataaattatgtaatcgaaccttgatgaatctacttccatatggaagaaannaaacggtcatatgagtcntattgcaagagatatctaagttttcgtgggacagggccagagcgttttctgggtcccctgatctgactttggaaattcattataaattaaccagagataattanaagtcattnnatntatgtatagattcctttttgagtctagtttcattagaaacaaacatnataagtattgaagccctgtataagaagttatctaagtcgnaatgnaggaaggtcagtgtagtcgaaccctgtaacaggggagactttaactantaaactgtactaattngctnnacnaaaaattctataaaaanntttttggatggatatatgagtctagtttcagggaaaanttacgaaactgattttcaagttttggaactcaagatatgatttttaaggtgacagtgatgcagttagccagctgtctggaaatttttaaaatggactgtgaacatacatgaattatgtctgttagcacctcgtggtcgcttccgacaacggtctcggatacggggtgttacatcttcaacaacctctcaagccatccatccactataaattccaactttcacttcacctttcaacatccctcattcatatctttcacattctctcatctcctctcctctcctttacacgataaaaacatttctt

SEQ ID NO: 13078 - DNA, 610 bp, Gossypium hirsutum
gcagaagcaaataagacagctcaggtagtcactatggcttttcctccttttcatgcacttctttttattttttattttttaaagtcaccatagctcaaatatgctattttttatccaaaggtgctaattagacttggactactttttaatatgttgctttgaatttgttaagaacaggctttttctattccatcttattcataagaaattacataaatatttatacacatagtaagcctaacttaggaaactctatactaggaaacagactaactctagggatgctgtctaaaaaaaacagccttaaagttagggatagtaatcagtaaaatatttacagaatcctatctgatacacttaaatattccttaaattagtaaactgtaatctgacactccccctcaagctgggaagtggatatcatccattctcagcttgcttactagtttttgaaacaactttccagacaaccctttggtaagtatgtctgctagttgaccatcagtggacacaaatggagtgcaaattaagccactgtccagtttttcctttataaaatgtctgtcaacctcaacgtgcttcgtacgatcatgtggaactggattatatg

SEQ ID NO: 13079 - DNA, 751 bp, Gossypium hirsutum
  misc_feature (58)..(64): n is a, c, g, or t
  misc_feature (637)..(645): n is a, c, g, or t
  misc_feature (648)..(648): n is a, c, g, or t
  misc_feature (650)..(655): n is a, c, g, or t
  misc_feature (657)..(738): n is a, c, g, or t
  misc_feature (740)..(747): n is a, c, g, or t
gtctagtgacgacgaaagctttttcgcaagcaaatggcccgacttgaggacaagtcgnnnnnnngagggggggaatgatgtgagcacgcccggggcatcttcgaatgcaaaccaagatctaaacgagctgcctaaaggacctataactcaagctcatgctaaacatttcctagaagctattttagcttctaaggcaaaaccttggttcgaaacaagggccaatgctcacaaaatcagcttgaagcaactatccaaaggacccgtgcattgttggcaagctgatcctagctcatttccagctcctcgagctccgtccagctcaactcagctcatttgagctcgtttcagctcgtttgagctcaactgaacttcctttcagctccttctttcttcctttcaataaactaagttttaatttagtttataattaagtttgctacagctcatgccgaaacccctagctcaatttcagctcttaaagggttttgactaatttgaatttacccaattttttttcttaagttgattataattaattttgtttaattttattaatttgtttaaatttgtttatttataattttaaattgttatttttaatgaatatttatcatttaattagttgggtggcaaatgnnnnnnnnnagncnnnnnnannnnnnnnnnnnnnnnnnnnnnnnnnnnnnnnnnnnnnnnnnnnnnnnnnnnnnnnnnnnnnnnnnnnnnnnnnnnnnnnnntnnnnnnnntttt

SEQ ID NO: 13080 - DNA, 679 bp, Gossypium hirsutum
acctttctgagtatcaagaattgttttgattcattcatctttcttttctcttgccgccccaaaccctagcattctatttattctaattgttttcttttgatctgaatttttaatttgttttcttttggtgctgataggttcggtagtttggaaattctctctttaaactcaaatcgggttcttggcttccaagaattgacatctcttagggcgttttaattcttgatgtccattaattgaattggggatttttgttttcgaatctgattggatctaatcttaattctctatttcattttcagatctgatcatctagagcttcgtaggagttttctcgagacttggcaattcaatcttggtccatgcgcaaccttctatcagatttagtttcttaatcaattgagttgaatttgatgtttcatcttcttcagatcagattcagtttggagagtcattcttgctatttagatctcgtttcttggcctccaacgaaccatattaatttgtgttctgcttatttgctgattaaccatggctttatggttttcgtttcagatctggtactaataagtttgattcctttgtttcgtttcagatctgatcgtctagagtttcgtaggagtttctcgtgacttgacaactcgatcttggtctgtgcgcaaccctctatcaacaaagg

SEQ ID NO: 13081 - DNA, 654 bp, Gossypium hirsutum
gcgatcactgtaaattatgaaccattcttaccatgcggttttcgattgtcacatgggttggccacacgctcgtgtgagtactgtagatttggttatttagtttttcacacggtttcagtttgttacatggcccatccacatggttgtgtgacttttgttgaatatttgcaatttgaccgacacagtcacaatgagttacacggtctatacacagctgtgtgactctagttctacatagttacaatttgctatgcagcccagtcacatgggtgtgtgacttttatagaatttttgttctttcattcacacggatttaaagagttacacggtccaaacacacgaccgtgtgacccctattttacatgttttcttttatcttttgaaaatgttacaatttaattcttttttgttctcaagtcaacttaaaagctttcataagatcaattgggactctgattagtttgtaaatcatattgtgcatggattgtgtaatttttttaactgtttaattgaattttaaagctggaattgtatgtaattcactctgttaattgttgtagcatcctatagctcaggtctaacaaccggatagggtgaggggtgttacaacttatctatctttactatatttaaaaggtttgccgagttgatgta

SEQ ID NO: 13082 - DNA, 600 bp, Gossypium hirsutum
cgtacgagtctatatcgagggaaaaacaaagtttcggactagtcgatccatttcgacattttaataatcaaggtaagttcatatgctaataaacgtatttaaattgtgttataaatgcttatttattattgaattgaattgaatcatatacgtttatttgtcattgaactgctatgagtgtcaaatgagcaagtacgagtaagaatcaacagagttactatatccgaaagtcccatacgaaccttaggaatagtataggatacgaatgtcatgacattaggttattgagatgtgattacatgtaagaccatgtctgggacattggcattgtattatgattacgtataagaccatgtctgagacattggcatcgtattatgatttcatgtaagaccctgtctgagacagtggcatcgacatgtgatagcatgtaagaccatatctgggatatggcattgtacgagcttatgtgattactgagtatccttaacaatttcaagtggttcaacggcatagataagacgagaattaaagtacggtaggaataagtaatacaagtacgtacagaacttatgtgagaagcgagtgaaagtaaattgg

SEQ ID NO: 13083 - DNA, 610 bp, Gossypium hirsutum
attagatcaaagaactgcgttttaggcttaaaggggttcacaaagggttaattatgttggtaagctttatgggataagtgggttaaaacctaggtgcctttatcatcttagtatatgaaatcaatggtgtggtctcgacatgtataattgaagcaagttctagaataaccaatcaatattgacacactcataactaataataaagtgagcaagaaaagtgtatgctctaaatgctcaaaatcttacaaaaaatatggtttttgatatcaatcttgcaaatttcaaacttcaaggtaatacttcaatttagggaaacaacctaacaaattttaattctaaaaatagtcttattatgcttgattttctcatgtcttaaagtttaaacaatcaatacacaattacctattaatttaatctaaaacacatcaacaaaaattataaatcaataaaaattcatgctaatagtagtatgagaaaattacttaaacataaggcataattcagggatttttaaataataacctccccacactgaagatgtacattgtccttaatgtacaaaaatagataatcatagcagaaaaagaatatcataagagagggagagaat

SEQ ID NO: 13084 - DNA, 402 bp, Gossypium hirsutum
tgtatataaaaaagattgttagatacaatatgtatcaaatcttgtaggtgttgcgacattgatgcatgtgtgttgcgacagtaacctttcatcatcttaaggaagtaaaactttaacgaaaaactaacttggagcagtctaccacgaatgtcgtaacattagatgtgttgcattgcaacacagagccctaatgtctcgattacaagctttcgaggtcgcgactccaagttgatggttgaagtgaatgagcctagtaccattgtccaaggtgtcgcgacacccaagctttggtgttgtgacactgaagtctgatgagttgaaaaatactgcaaggaaaattttgtgtcaaatgttaggcttgaaaaattggttgtattaaaggaatccttgtgccaaacaaaa

SEQ ID NO: 13085 - DNA, 483 bp, Gossypium hirsutum
attgtaaactccggtaatgctccataaccctcttctggtgacggtttggggttaaggggtgttacaaagcggaataaagaagctactattttattgaagtaaaggataggtttttacaaagagagaaagctgtaagtaaaatagaaaatttcttcaactattttccgatgccttgtttaggcttcttacattactatttataacaaaattcttaaactctatttaatttttcttcaatctcgcacagtgtttctgataatgatgaatttattattgtttccacgtagcccaatgttgcattaatgattgtttccacctgtcttgtcacattattgatggtttttgtcttcatctaggtgccttattgtttaagtcatcccttgaatgtagatcttccacgtagccttctcgtttttatccttataatgacccaaaatttacgggcatcgaaaaagtactttatcggacctccgtcttaactaa

SEQ ID NO: 13086 - DNA, 531 bp, Gossypium hirsutum
  misc_feature (499)..(502): n is a, c, g, or t
  misc_feature (504)..(504): n is a, c, g, or t
  misc_feature (507)..(509): n is a, c, g, or t
  misc_feature (511)..(512): n is a, c, g, or t
cctttcaatcctttgttgagtttcagcataccccgggacactcattaccaggtacatctcttcctttctttttagagtttttgttgccaaaatatgcacaagagcgtttgcggatcttggtgtgtgtttgaacatgaaacttttggatctgcttagtttctgttgaaaatcatatatatatgctccaatatgtgatcgatcttgacttttgtttgtacatttcttgattattgtgagagagtctccttcgattatgatctttggccattcatgttcaaatcctatttggactgcttttcgacatgcgattgctttagctgcaaaggcggaagttaccccatgatggatctcagagcaagaaagtaagactaccccttcttcatttctgatcactatacctgaagctgattggtggtgagtcccatcatatgcaccgtcaaaattaatttttatgaactcactaggtgggtaactccatcttcttatcaccttcccaaannnnanagnnngnncataaaatttaattttgac

SEQ ID NO: 13087 - DNA, 495 bp, Gossypium hirsutum
gagttgtgctttactttgttgtatatacacgttctttgctttaaagtcttttaaaaaagtataaaataagagtgaagtcaattatattcagaataagaagcaaagattgctttttcacaatttggttttgcttttaagcataaaaaaacaccgaacagcccaacaacagtttttcaataaaatagtctattgcagttagtgaaataaacacaaccctgttggggtcttacagctaaaactataattttccattaagcttaaagggtaatgtgttggcaatcattcagtctttctcaatccacttgtgaccaagttgctcttgtttgattacatgattgaggtttcacgattttgtacacacacacaaaaaaaaatcatcaattaaagatgatgccaacaattatatatatccaattaaattgtagtacactatggatatgagattcatagtttgagtagcatgacagtcaaagctgtcatagaacaattttggtg

SEQ ID NO: 13088 - DNA, 360 bp, Gossypium hirsutum
tagattttagggaaaaaattgtgtagatattttattattttacaatcatatcaacaaccataataaccaaatattaaaacgaaaaatggcaaaatttttcatgttatattttaccttcacaagttaaacttttagtatagagaaacccaaaaccataagaaagccatgaaataaattatttctcttctcttcgttgtagagttgtgcgagtagcccggctggaaggtctatccaaaaaataaagggtttagacaaaaatatatatctaaaaaataggtttaggcaaaaaataatgtccgtttaaaaaatggattaggcctcaagtaagattttttttttacttgaatctgacccgaattt

SEQ ID NO: 13089 - DNA, 625 bp, Gossypium hirsutum
tgttgctaattaaaattgatgaatgaattttaatattttcataaaagtaaacatcaaatattattttcataaatgaatgaatgaattattttaagaaaatattacaaaaaaagaacataaaatatttccatgaattttagataattactttatggaaacattataagtaaatggatattatatctaaaaataattattattaggtatcaatgctatttaatagtgggattctatttgaaaatttgcttatataaatataatgtattacacaataatgcttcttaattatcataagtcatattttttctttaaattaaaaaggcctttgtctttgtctatgtctatgtctatgtaactcgtgatttctgaacacaaaaagtttgatagtataaacttttcataatcattttgcaattaaaaataaaatcatgaagagagaaatttctgaagggctgaatcctcttcataattgtaatattccttcacaggcacctagtgatattaatgtgaagagagaaactggatataagcccaatttacatatttattgtacttaattttgattaattttggaatgagacgtcattaatttaagtttattatttgatttttgattagtgcataa

SEQ ID NO: 13090 - DNA, 610 bp, Gossypium hirsutum
  misc_feature (59)..(59): n is a, c, g, or t
  misc_feature (61)..(64): n is a, c, g, or t
  misc_feature (66)..(67): n is a, c, g, or t
gtatagtccaaccaccaatactgctcacgaagatcctggtacatcttacttcctccgcnannnnanngtaaggactgctataagcttccctcagaatggactaccttaactatgaatttgaagatgcacaatatctccctcaatagcacaaaactcccttataattaaaagcaaaatatgaagtgttacgctccttgataagttttccatgaggtgctaaagacatatccaatgactattttaccttaatctattttaacagagtaggtcgcactcgcaattctgccagtaaacctccatcctcaaacaaaatcagcctagaaaatatttccattaactcacccaatgcttttctactcaaagcatcgaccacaacattagttttacctggatggtattcaatagtgcagtcgtagtcctttagtagctctatccaacacctctatctcaagttcaactccttctaggtaaggagatacttaagactcatatgatatctgtagatgatgcatttctccccataagggtagtgtctccatatcttaagagcgaaaaccactacaaccaattcaaggtcatgcattataacagggtcgttgttattgaaatc

SEQ ID NO: 13091 - DNA, 520 bp, Gossypium hirsutum
ttatgtttgtgaccgaaacgggttggccatcaatgggcgatgaagatgaaataggtgctagtgaatccaatgcggcgtcgtataatggtaatttagtacggaaagttttgaccggtaatgggacccctttaagacctcaagacccacttaacgtttatttatttgctttatttaatgagaataaaaaacccggtccaacttccgaaaggaattacggtttattttaccctaatgaacaaaaagtatataacataccattaaccaaagaggaggcgaaaaccggtcagtcaacgccggtcaacagcaacacgagtcaggttccggtagccggagaagtatcgaaggcgaaagtaggtcagacatggtgcgttgcaaacgggaaagccgatgagaagaagttacaagcggcgttggattatgcttgcggagagggtaaggctgattgtagccctattcaacctggcgcgacgtgttataatccaaacacactcgaagcacatgcttcatacgctttcaatag

SEQ ID NO: 13092 - DNA, 656 bp, Gossypium hirsutum
  misc_feature (19)..(20): n is a, c, g, or t
agtaaattcgacccgaatnnagcgtgtcacattaaccaccgatgtgactctccattaactcctaacttaacctccaatacaccacttagagatagcatgcgaataaggtgtttaaactttaacaaagcaacgaaagtcatgcattcatataacataagagtttgcatgcaaaatagatcagagtacataattatgcaaaacaataattgttatatacttagaaacatttataggttcgcatcacttaaacctttcacataacattcaaacatagctcaactaccttaatatcataagagatcgcaagccaacacacaaacatgagtttgcagttcaatataggttcgcacaaaaacatgaattcgcaagatacaacagttcgcatacaacgatataaaacttttaagttcacaacagttcacataacacctaaaattctcagaaatcatagtttcactaattattagtctttacaaacaagaaaaatatgcatgcaaaaaggaatattacacttaaacagggttctcgcaaacatgtaagggtttgcaaaggtaagggtacgcatgtaaatatggtaagcatacctagggtctcgcatgtaataaaactatcacaataggggcacgtttgtaatcagcatacagtggttcacatga

SEQ ID NO: 13093 - DNA, 485 bp, Gossypium hirsutum
tgtaggagggtgataatgtcaaatgatatataattatcaagtctatgttaaatcactaattaacattcatctcttacatgtagaaatattaaattatgttagaacaattactcaaacgcatatataatgattttaactaccaactctgccaaacaataaatgtatatagaaaaactcgtgtaagtatccttccaaaattaaatttaaacaaaaaaatatttttattattaaataatttgtgaaaggtgttgaaaccatttttcgtaaacggggttgactttaattttgaagataaaaaaataaatatgggagtcgccactaatctttttttaatgagatgtgatcagatcacattgaaaagtggttgtttttaataaacgattcgattttattaaaacaatgattttgatccacgaaatttagaagaacgggttcgggagtcgattacgtacgagaaaggattagcactctcgtaacgcccaaga

SEQ ID NO: 13094 - DNA, 693 bp, Gossypium hirsutum
agcccatgataatacagtggcagtaaatgccattgggaaaccaaatttaacgttgtcaccggcatcatacatccccatggaaagatccaactttgcttgactcccatccttaagccctgaatttcctcgccacggtatcttatcatccactagcttaccggctgccatcaacaaacaaaccaaacctcaaaattaatatataataacaatatttgatgccaaaaaaaattagaacaatatcatatcattacaatttgtagccataggtaaaataacagtgttgttgagtgtttctttctatctccctcaagtagtggtatctgtatatttatatgatatgggtattattcattgacatgacatattattgacatgacatattagataggcttcatgcatatacacatattttactctagactcaacacgtatttatacagttttatgcacgtgtaacctcgcaggagagcaaacttagcttgtgagctcattaggatccggcccaaacccattcaggttttgtgccggtgatgataattatcctaacaggtgtatacatgctcaaatttaggatttaagacttcaattccttctccatcatatcgtattatccattagcttaccaataatcagggaccaataaatttaacatataatatttatatcaaaagggtatcgaatcaaaagcattgg

SEQ ID NO: 13095 - DNA, 520 bp, Gossypium hirsutum
  misc_feature (54)..(62): n is a, c, g, or t
tttgggtctattgccttttaatcctttctcattagactcataagctatttaatnnnnnnnnnaacttttacacctattacaattcagtccttttcatttaattgactacccaaacattaaaatttcctaacgaaattttaataccacattaataacatttcataaatatttataaaattatttttgactcggttttacgagatagaggtcccgataccttattttacccaatttcttcaataatttctttttctaactaatcactaaattgataaaattttcctatcaatattttcatacgattttcctatcatataaattttcaagcaaaaatattgaaataaatttctctttaaatcggatttgtggttacgaaaccattgttccgataaccttgaatttaggccattacaactctccccccctttaaaggattttcgcccccaaaaatttaaccagaaaaaaggttggggaatggttcccccttggcccccccgggtccccaggtggttccccaaaa

SEQ ID NO: 13096 - DNA, 400 bp, Gossypium hirsutum
acccagcattgctttttctttctttttttctttttttactttttaagacaccaaactataaaaaattataataatttttcattttttcaattttttcgtttttgactatttaattatcttaaatttttgggtgttttaaattttacgttagctaattagtaataaaaaaaagccaaaattaaatagttgaataactaaaaaaaagaaaacatatttgaatgttacacttctttaatttaatttaagcaacataatttctttttataacactagtagattctatttttttaagaaaatgaaaaaagtttacttgtttgaaaataaattatccgtatatattcttaggataagaggattgttgtcattacttaaatatacaatgaacgagttaaaaaatgga

SEQ ID NO: 13097 - DNA, 534 bp, Gossypium hirsutum
gaagctaaccccatgaattgcaagcgaataaaagtaattttgtaggaatattgctctacttcgggtcagaggataaactttgagaagtcttcgatggtttttagggccaattcccttgcttgcttacaacaacaaatttctagtataatgcatatttcacttgattagtaatccaggagtttacttgggtgtgcctgccttacggggaaactctaaaactaatgccatggggtatatgagagatagagtaataagtaagctcaatgagtggatgaagatgacactttcaccaaggggaaaagagatcttaattacggttgttgctatggcgatacctaaatatacaatgtcctaatttaagtttccaaagaagttgtgtgttcaaatgaactttgctatggctcatttttggtgtggacaaaaagagaatgggaaatagaattcataagaggtcatggcataagcttactgaagggaaaaatcaaggtggcctcggttttcaagacttggaattgttcatttggtgcttccatc

SEQ ID NO: 13098 - DNA, 561 bp, Gossypium hirsutum
cacatatcgtattataggattaccagtccaggctaaatcctttatgtaacatatgctcagaagagctcaattagaattactagtccatgctaaatcctaattgtaacatatgctcaagagggattatatcaggattacctgtctgagctaaatcctttctataatgagatcaataggattactcgtccgagctaaatcccgtcagcaacaaatctaggaccttattttataagtcaatcacatttatccattgaaattcaatattcaaatgagactttacactttttccaacatttctgaacatgtaatcctttcacacatttataacattcacataaatataattcatattgcatacaatcataacattcaagttaacatatttacatgctcgattaagttacacgaacttatctcgacacttgtttgtgtaaataatctactaatccgaaacatttccctttccttgatctaatctcaaatttgtgttgtccggatctatgtaaataactttaatcatcaatttcacacatttcatactcgtttggactcaatttacat

SEQ ID NO: 13099 - DNA, 569 bp, Gossypium hirsutum
agaatatataaattatatgtttttatgtgaacaaggacgatcaagccctacacacgtagcgccagctaagatatttgcctcacacaagccaacaaattaacatgcaatttaaatttacatgtgcaaacaaaaaaatgcctcgcacgtgcaagtgtgaccagcacgtgtggacttatagtcagctagagcatgaaacgaaacaacggcggaaagagagagaaagatgaaccgacggtacgccgcttagaaatcggcgactttccggtgtggccgagacttgacgatgtccttatcgagttcttgcaagttcctttggcttcgaatcgccaaaacatcgcctctccggaactccataaatcggcttacctcgccgatttcacgtgaatctggagaaaacgatgaaaattaaaaaaaattcaagaaaaaaaaaaggggagtggaagctgcattatacctaaaggctttgaggaaggctggaatccattaaaagcggccaaatctgaaacttaaacaaaataaaataaacaaacaacaaaaattaaatgagtacccccaagccctaatcccaa

SEQ ID NO: 13100 - DNA, 410 bp, Gossypium hirsutum
agagtgaaataagggaaagttagtgaagttgtgttaaaagtgaaggactgcttatgcttatatagaggctttgaagatgtgaaaaaaaagtgtgattaagctgatggtgagagagagagagagagaggactaaaacgaaaggtttgatcacattttcgtaaattttataacgcttgtgtttgaatatttgaatatagttttattaaacaggtattaaaattttaaattaataaaggagaagattaaatttattaatgtaacgtgggaaacaattagtgtattaatgtttataaaatacaatttatttaatgaaattgttgttttctgccagcctccaactttgaactataataaaaagaattcagtcaattatggcttgctctcattttgtcatattttatatattttac

SEQ ID NO: 13101 - DNA, 557 bp, Gossypium hirsutum
aaacacgaaaggttgttgatttgttttattcctttctttgaaactacgcatatattcatacatatttcatttttatttgtgttctatgtatatatataagatatattaataagttttttttaaaaaaaagaaaaaagcgaaaaaactaaaatttttacctttttcgaaaatccggccaccgtgtacggtggtcggcggcggtggcgcatggcggtgctggagtctcaccggaaatccccaggctgagagagagagagagagagagagcttttttgaagagaaagaaagaaaaaatgaatttttttacaaatttttttgcttttataacaatatgaaatgacgccgttttgcattaaagacccagggcataaaatgacgtcgttttgtcctgggtcggattgacctgacccatactcgcttagaatccgcgtgtttttgacggaagggctaattgcacttgtagcccttccgcttttttatagctttgtaatttaattttttgtatttttaattttgcccaaaaattttatttttgtttcattttggtcctctgctgc

SEQ ID NO: 13102 - DNA, 557 bp, Gossypium hirsutum
  misc_feature (373)..(373): n is a, c, g, or t
  misc_feature (379)..(379): n is a, c, g, or t
gtaaaagagtttagctaggcttgaaatacgaagaaattcgataaaaatcaattttcgggcataggggtaaaatggtcattttgccaaggcctaggggcaaaatggtcattttaccaaagttgtgaatttatgaatgcctaattgtgtttagggactaaatggatgcatattgttattatagatcaagattttccaaaaccgagcctaaaccggggcaaagccaagcaatccaattaagccgactagtcaagaactttttgtaacccgaggtaagttgtatgtaaataatacaactacactgttaatacttgtattcatattgtcattgaattgatattgtacaaattgttaagttataattgaaaatgccttntaatanttgaaaaaataaaaaaatccccttgaaaccctaagaaatgaactggatattcctgcccaaaaattgggggatttgtgcgcccatggaaaaaatgtttgggacatgcttccgcccccttaataaaaccaaaggaaaaacatggttgggaaatggcctccgcccccaaaagaaggccaaa

SEQ ID NO: 13103 - DNA, 470 bp, Gossypium hirsutum
  misc_feature (454)..(454): n is a, c, g, or t
ctcctcttcttcttcttctgctctccaatggttatccccgccgcaaacgtttaacaaaaaaacacccttttgtttatacccaatgccagtgtatccacgcgcattccattttcccatgtcaagacactcccgcggcgagaatccgttactctgctcttctttgctcaatgtccattttgggtcctaaggcttcttgtatctctttcaaggattctacttgtaggtgctttgggtacatggtttccaagaagaaatacgtctataccattgatgatgactgctttgtaagctcaaccctcgtctcttccctcttctattttttgtttttgaattttgggttttggtgggtttctccgaaaacagtcttcattttaaagatctgagtttgatccaacttttttaatactattttacttttggttttaagcctcggatcttgatgtatggaagttanctagatgtatggaagt

SEQ ID NO: 13104 - DNA, 426 bp, Gossypium hirsutum
gttgtttttaaggtaaaaagaataattgcaatttcatttttaaagtatgtaataattatatttttattaaattattctgcatctccaaacatatctaatcatgtttcaaagattaagtaaaaggaaaaagaatatgcgcattttatttaacctaaaattggtatcaaacccttgtttttcattccttttctattggtatgccatatatatatatatataaactggacattaattcaatgaaaattgattaaatttttttctttgtatattacaaagatgttttaatttttttatatccttaaaaaataatttaaactcaataaataaataataataatcgtgagattcgaatataaaacattaacattttaacttcattttagttaaaagataaaatataatataaatactttggggaggaatcca

SEQ ID NO: 13105 - DNA, 647 bp, Gossypium hirsutum
attctatatggagtgattgagataggtgtcgtaccagaccaactcaataccaaattcaacttctctagctggtggtaattcgggtaactctttcgggaatacatctataaactcacaaaccactggtaccgattcaatcttcgactcaggcacttgggtattcaacacaaaagtgagataagcctcatatccttttctcaaatatttttcaacagtcaatgacgacattatctccgaaaagttacccaattcatttggtccaacccgaaggacttttccatcttcacatttcaacttaataacttttctcccacagtccactacaacactatgagaagtcaaccaatccatcccaaggattacatcaaattcattaaatggcaagaacatcaagttagccaaaaaatattgacccctaattttcaaaggacaatttctacacacttggtctactagcacatgcttacctaaggagttagacacttttatcaaaaattatgtggactctactaacatggtcatatgaggtatcaattccatacaaatataagagtgggtagaccatgggtcaattaaagcaacaacagatacatcatgaatagaaaaggtacccgtgagcacgttgggagactttgcctcttcacatg

SEQ ID NO: 13106 - DNA, 684 bp, Gossypium hirsutum
ggaaagagattgttctggtccaactattcctagactagttttgatgtaatttgctatttttcttatattttgcattctaacatgatacttttaatatacattattttaatgtttgcatttttatcacttttttaatgaaataaatattaaaattatacataaattttgattcaatatgtaatgttatacactaattttgattttgtgtgatttcatacatgaaatttaaaaatataaatataattaaatgactattgtgtagtttatctaaatattaaatgtgacataatctcgtaaattatattaaattattaaagatgaattacatcaatagtcactcaacttttaaaaaataataaatcgaccactaatgttatcgaaaaatgataagtcaatcactcattcacatttttcgttacagacataataggacaagtgattgtagttaactagatgatgtggccagttaacttgactcgttagacattttcatgtcatccctttcacacacaaccattaaacaacaaaaacaaaaagagaaaagggggctttttcactatttttcttcatccctctcggattttgaagtcttgttcaaagctttgaggtcttaatcttatgattttgaaggcctattgggaaatctaaagtgagatttgaaaagtgacaaagaggattcatttg

SEQ ID NO: 13107 - DNA, 603 bp, Gossypium hirsutum
  misc_feature (59)..(59): n is a, c, g, or t
  misc_feature (593)..(593): n is a, c, g, or t
aaaaagtaagaagtaacggctttttcctcctctctctctattcgatttttttatcattntactggcgagcttaatctccatcattttcggtagcttgtctttcaaacattccaattatggtgacattgctgctttctagctgggaccctttgtatttcaaattttttgatgttaagattgaatattgaaattttttcacagggttatcggttagatagctgctacaaagtttttgagcaaagtggaagcaaagagaggactgtcggctttaggaggtacacgatggctgatagagatatcgcaacgaacttgacccgattttgctggttcttaaatttctgtgagctttattgactggtattagtggtatgtatccatgcacgttgcaatggattatgaatattgttagggacaataaaaatgtgtcaaactctcatctcaaacatgtgtataaacttatatataaaaattaaaacagggtctcataggatcccgtggcgccatattagacataaaaatatatttcccatatttaaagggttggggggtaaaaccccgggtaaaccccttttggggaatggaaatggggggancaaccctgaa

SEQ ID NO: 13108 - DNA, 515 bp, Gossypium hirsutum
cctttctccaacatattaatttaaacattcaaaattgactttttgcggctcatgttaggcctgatatcatgtgtggagagattttgtcttttttgataacgaggtgattaaagttttcattaatgatggttaatattccctaatcaatccacaatgagatgaggtgagagaacaatagtcgatatgattgcgcacaccaccaaatcgttgccgctagcaccattatcatttcattgcgttagaaggtctcatttgaaaatcctttcttcttttcttacaattaaatgctaaaaactaagttcttgcattacggggttaaaattttagtttggtaaattttatggccttaaataattcttttgtttcaaatctacctaagtcagtatatctcttaaaagtgagaattctcaagggaaattctccaaggcaccaaaacaaagccagaacaaactcaaaagaaaaaagtacttgaatcaaactaaaaatacgaaaacaatgcacgcaaggtgtttgat

SEQ ID NO: 13109 - DNA, 495 bp, Gossypium hirsutum
ctataaacccgtgttcgcaaattaagcaatcctttgactaaaatgtttaaatgtcaataaaatcatgaatcatactttgccgttgaaaaaaaaaggaagtcggggtatttgaagtattttttaaagtagaaaaaaagggtacttttcaagacagaacctaaaagggaaaaaaaacatggaaaaacagaaaaaggggtactttatttctgggaacttaaattgaagtagttgctcatactttgctgttgtaatgggaaaagaagaaatgggtatggaacaaaaaaggtggagaaggagaggatgagaagagggaatgggataaatatggaggaaagaacaagaagaaaaaggaagtcggagcagatgctactttggttcggagctacagaagagatgggttagaacttagaacttgagtggggaagttcgaagccgcagcctcaaaaccccagtgggtgtaggtgcgggctatgcaacgcggagtacactcgtaaa

SEQ ID NO: 13110 - DNA, 254 bp, Gossypium hirsutum
ttttatttgttttcaagtactaaagattatagttatgaaacaaatcaagggtcgctttctttgtttattttggcagcagataaaataatcttttcttttctaggttgacaaagaaagatcacttttttaattttattttttttaacttttgtcatgttttggatattaaatttatttttatacaattttagattttatttaaggtctttctgttttttaaataaaaggaaaataagggtttccggagatgaaaa

SEQ ID NO: 13111 - DNA, 649 bp, Gossypium hirsutum
gggagaagagtggagaagatgaatgaaaaactactaacttaagccatttatatcttaattaaatccttagtcacttaactaatttaattaaactttaattaattaacattaatcaaaattagaacattctccactatttgatgaaacaaaatggtttatttaccatttggaacctttagctatttaaaaatatttagcgataagatttttacaatatagaccctgtacattaattaaacaactaatagacaaaattaaagtactaaactttaatgttcttttataccaactccgtaaatatctatattaaatatttatagacctggtttacgaaaatagtgcctttttctacaccatagaaaatcaagttgttacaactaaaatcttcaccttgatgatcacaaacactatcattatcgggtccttcctcaccatcaacatcgataccaatcaccaatggatttattagttaaacggggacccgaattagggttgttatacgcaatcggagcattgtgtggattaccttcctatgtcgatgccgctccataatctcatagttctacccacccaacattcataccaaagtcaaacttgtgtatagaagatcgcctatcgacagaggctttcggaacctctatgtacaggt

SEQ ID NO: 13112 - DNA, 682 bp, Gossypium hirsutum
tggcacctataacctggagtatatttatttgacgaaagtgaaatactcttaaaaaagaagggctaaatttagatttttgatactaaattgacatcagcaaaatacgttaaggacgagaagagtatacggtcccaaagagaatcaaagtttgctctctaattaaaaaatataaatgggttgaacgttcttatcctcgttaaagcaggagttgcatatggtatgctaaatgtagttgtatagttattctatcagttatatttatttttaacagttaaaataaataaaattttaatagaaataattaatttactgattagtttaatatacaataattaatttacttattttttttatgttaatgagataaaatgtaatctaattcctaatataaagattttcatgatacttcaccctcgatttagctaacatataaaaatcaatcaataatctacaaaattttaattacgagttatgttaagttttgtttggagcaatggttagaattttcttttaatacctaactggcattgatttaaacaagggtatcgatatcatatcggtatcgattatatcgagtgatatatatcgttgaggtcctgaactagtaccaagtactctaagttctgttttggtgtattttagcttgtttcagtcaatttcaacttgtatcgaggcaagctag

SEQ ID NO: 13113 - DNA, 664 bp, Gossypium hirsutum
tcaacgttcaatcgagtcaaatcaaattaggtgaaaaaattttaagttaatcgaattgatgagtcttattttatcatcctaatttgatttaaaattttttcgaatcgagtcgagtgaaataaaattcgagtcgagtcgaatcaagtgaaattgtgagttaaattaaaacattaaacatgtcaaattaaaatcttgttatagtataattaagagcacataaatttgaaaccatgaatttttttccaaagaagaataataataaaatatatattttagttagacaaacttgaatcattaattaacttatttaggtcccaaaattattagtctaaattttttttaatttttttgattttttttgaaaattttataatttttttgttgagagagaccattttgcttattttcaaacttgacatagaccaaaaggatatttacaacaatatattatttgaattatttgaactatttgagttattcgaattgtaaaattcaactcgattcgaactcgaaattcgaattacttattcgagttgattcattcgagttgactcaaataatttaaataactcgattcaattaatttaaaattcgattttttattttattttctcgaatggaatggaattttgtttccctagctagaagatgagaaatgcaagga

SEQ ID NO: 13114 - DNA, 668 bp, Gossypium hirsutum
gtttgtacgaggatcttagatatgatattaattccaagtatttttttcatccaattttttattctctccccctaatgttgggaaaattatcatataataattgaaaacttatgtcataactaagcctccaattaatagcttaaaaacatttatataaagagactcattaatacattcccaacctccaattaggaccaatctttgtgcattgtggttaaaaaattgaaacatatacacatacaaaaattcaaagatgggaaatatttaattcttgaccaaaagtaaattttaatggggagtatttataatttattgacctaaagcgtacaagtgttgtagcatttaaatcaacataatctcatattgaaatatgaagctttgttcttataagtaacggtttagttattcattagaggcggtcaattaataatttctctaaatcattatgcgtataaataataggctttacaaaaaaaaattcaacttatatacaacaatcaataaaagcctgagatatgaactcactagcattagcaagatgaattgtcttacttacataatttgaaattaatttttaaacaagtagtcttggaaactacaagttgcaagttaatatcacatatgtgattattttgtatcaaaaacatccacatgtttgatgaatgacc

SEQ ID NO: 13115 - DNA, 425 bp, Gossypium hirsutum
atcttgcttacttccctaggctattatttgggtccaacgtgatgtcttttgacaatgacttgaacatgttagccactgctttgtcactcccaagtgcattttgaatgattccttttgagtgtaaaagggccacatctttcttattgtgtataatgttggccatgaaaaatatataggatgtaatctcagtacctgcgctaacatgcaaactctcgaatgctactaggtttaaaagcttggattctgtggcaacatctatgatgataactgatagcttaaggacccctccatgaaatgtaatatccttgaggctaatagttttacttttcttgaatctgattccggcttcattgagctctattgcggatctaatgatgtcgtccccatcttcgtagtgtggtctgagatgcgagtgacattttttt

SEQ ID NO: 13116 - DNA, 629 bp, Gossypium hirsutum
ggccgaagagtttagagcaaagatcgatgatgatcccgagaaagcggagttctggcttgaaaattctacccgtgtatttgatgagctctcatgtacacccgaggagtgcttaaagtgtgctgtatcacttttgagagattcagcctaccactggtggaagactttggtagcagtggtgccaaaagaaagggttacttgggatttcttccaggaagaattcagaaagaaatacataagtcagcgatttattgatcaaaaacggaaggagttccttgaattgaagcagggcaagatgtctgtggcagagtatgaacgcgaatttgtaagactcagcaagtatgcccaggaatgtgtgtccaccgaggccattatgtgcaaaaggtttgaggatgggctaaatgaggacattaaagtgcttgtgggaattttggagctgaaagaatttgtagtattggttgaccgagctcttaaagccgaagaattgaacaaagaaagaagaaaagctgctattgaggctcgagatgccagaaagaggccgataagcaagtcatttcaatctcaatcaaagaggtccaaagagacaaaccctcgaatgacagtttcagctggggattcacacagagattgtg

SEQ ID NO: 13117 - DNA, 648 bp, Gossypium hirsutum
agacaatgaatgagctaaccactaaatatacaagaaaaggtcggaaaagaaatgatctacaaccagaatctcattacttgaatcctctataacttagtttggtttacctcacatgaaccaggcaagcttttatggataaaggagacctcttcctcagttaacttgaaattagcaatgagctttatgcattcttccaaaccagcaaacactgtaaattcaccaccaaacgggttctttcggaaatatagatcgaacctgaatgcacgttttaaattttaaatcaaaagctcaaacattcgatctttccaaatggaaatactttgaatttttcatttccgaaactaacatggaataattaaaataccaatagtttaaaattttgttttctattatttaatgctaaatgaactaaataccaacttgaacatcatcgaatgataaagtcaaaaggaaaataagaaagaaaaggaaatctagcggaaacaagaaactataactaactacctaactaataacaacatagcaaccataatctacatccaagccgatttttcatagtagccaaacaaagcatagataagaaagcgagaaaaaaaagagattttattcaaaatgaaaagaaattggaagagttggaaagttacacag

SEQ ID NO: 13118 - DNA, 385 bp, Gossypium hirsutum
ggatatgagtcaacccatttctttctcttgcagtgtatgagaaatgataggtatgaaaaaattcattcagttttctgatatcttcgatggaggcactaatcaccgattcatctctcctgttgatattttccttttttattattgtgagagcatctccctcaatctcaacccatttggagtcctaaatccactcccatatgtgtcgcctagagacatgcaactgcctctactacaaacaccaatgaaatatgtttgttgattattattttcgagcctaccactgtcccatcgggcctccgcactactagtctcgaacacgattcttttatgctcttttggaaaaatctatcaaagtatattttaatcaaatctgacatcagtagtc

SEQ ID NO: 13119 - DNA, 450 bp, Gossypium hirsutum
agcattgcagtcccgtggctcatgatgtgatgttatcaaaactctacaaccatgtcccaaaaggtgatttacattttactagattgatgttgataaaaatattggagccagatttgtaataatcggtagagcatacgcataggctttgttttatattgcatttgtttggagtgtcactgtggtattattcctttggttccgaaacacattaagatgagagcttgttaaatggtttgctactggaaatgtcatttttataccgtttttcttttaagtgcaaaagggttggttctggcataggattattgtaagataatggaactctgtttttcgtttttcccccctcaaaagtatattcttgcaatttcccctcatcactgttgtaagagcccatttttgcccgggcccataccagctaaacaaacccaaaatttcaatggcccgaatggc

SEQ ID NO: 13120 - DNA, 709 bp, Gossypium hirsutum
  misc_feature (681)..(681): n is a, c, g, or t
  misc_feature (687)..(691): n is a, c, g, or t
  misc_feature (693)..(693): n is a, c, g, or t
  misc_feature (697)..(705): n is a, c, g, or t
ttatagggacttgggtgcttaagggtcggcaaagacaacttcttgatcataagtgtgcttgcaacatttgtgcaactcccgccatcgatcacaacgctacaaacccttccatgaacataacatcgggtatgaaacaaattctcgcgttgcggttcacctatagagctttgtgcactaagacttcttttaacaatgagcatttcaccttcaacagcaaattctacttcatcttcattttcggatggatgttgaacttcttcttcgtttttgtctacttcatcctccgattcaatctcaccattgggaagcatgatcattgtgttacgatttgggcattggcttgcgatgtgccctctcccttggcacttaaaacacttaatatcacgtgttcgggattgagtattttcaatggccttacctttgctagattcagccacagacttgttggacttcatgggcaccacagtttcttttgattgatttgttgaaacattcttacttgccccttggttccacttagatgcattcgaagaggaataaccacgtacggctcctttcattttgagttgcttttcgaccttgatcgccatgtgaaccatatcgacgatctctacgtagtgttgcaactcaactatgttggcaatttcacggttaagtccggctaagaaacgagccatagtnacctannnnncncttnnnnnnnnntccc

SEQ ID NO: 13121 - DNA, 598 bp, Gossypium hirsutum
gtcgacttggtcagtctatcaacaacaacccatatcgcatccttcttacttgctgacaagggcagtccggacacaaagtccattgtgactcgatcccatttccactcgggtatcatgatcggctggagtaatcctgaaggcacttgatgttccgctttcacttgttgacatattaaacatctcgaaacaaagtcggagatgtcccgtttcataccatgccaccaaaattgacgtttcaaatcgttgtacattttcgtactccccgggtgaattgacattcggctacaatgggcttcgttcagaatcatcgaaatgagttccgaattccttggaacacacaaacgatttctgaacctcaaacaatcatcatcatcaatttgaaactccgattcctcgttcggaaaacacttagcccgttttgcaaccaattcatcatcgactttctgagcttcacgaatttggtgagtcaataatggtttagcttttaattcagctactaacacattgtctggtagaacagacaaatgcacgttcatcgctcgtaaagcaaacaatgacttccggcttaaggcgtccgcaaccacgttagcctttctcg

SEQ ID NO: 13122 - DNA, 648 bp, Gossypium hirsutum
agatcacacgcgctacgtttgtactagaatcgactaaaccgtagctctgataccaataaaatgtaacacccctaacccgtatcagtcgccgaaaaagggttacgatgtattaccaaatgaaaacacaattttcggacattcatggatacatatagaaatttaatcatttttaattcatcacatttgaacctatactaaatcaaatcaattacaataggttatatatatgttaaaaaaacaagttactattcataaggtcatttacttaaactttagccgaacatttataacatgctaaacacgtatgtcttatttaaagtcaactttcattcttctctattactacatacacatataacacttctaataaacaagcattatgtcaactatcatatattcaatcaacctacgaatcatttcaaaacataattatttaatcaaatataccaaaatgtatatgccaacatcatgacaaaaattacaattatacaaccaatttacttgttcatctactagactatcaaaatcaaacattttagtcatactaattccaccataaattttaagttaaacttaccatataatatccatatacatatatcaacttgtcacataaatatcaatccaccaacgtacatgttatatgca

SEQ ID NO: 13123 - DNA, 679 bp, Gossypium hirsutum
tatgtgggatgagtggatgatggatgggcaaaataggtgagtgggcaggccatcacatcaagactttgttttgcgagccaagtgatccgtttcgcattgacatgttaaacgttaataaatatgggtggttagcaatatcagatcattttcaataattttttttataatgattaatgttgtttatcaatttcaagtgaaatttaagtttaaattatagtagttgtattgattattcgaattttttattattattataattcatcaaaatatatatatacatactcttattgaagaagcagttaaattaaaaaaatatttcatggttttgtttttgtttgtcaaataaaataattaaattataattttgtaaccattataaatttataccgttattttaattaaaaacttcaacaaattaagaactgacatgtataattttttataataataaaaattttaaatttaatattaaataaaaattaaattaaacttatttaatattatttttccgcccccaaccccccaatatcttcattttttttcaaagttttttaccctaataatataaaaataaaataaaatatcaaaatagactgtttcaaagattaagtatcaaaatggtacatttcacttggtagaaggtggtgcataggcggcaccatcctgaatttcttaccca

SEQ ID NO: 13124 - DNA, 418 bp, Gossypium hirsutum
acgtgttttgtgggtgacgaggcgttcaagagcatggtgggcggagaaggggctgaaaccgcggtggggttggtggtgaaagaagggtttaaattcccacagggtgcattctcgtgccgggtagggttacggtacggagatggaaagggaaagaaaaagcaatcgaaaatggttccttgcgatgtgtggaagatgagctttggcggatttgcatggaggctcgatgttaaggctgctctcagtttgggactctaacgatgggaacccaacccattcccatagtttttgcaggtaatttaaactcctttttttttttcaaaaaaatttatacaaaaacaaaaggggtaaaaaaaagttttttttttttttaatattttgggtttataaaaaatcaaattaggagggaggaaatgaatta

SEQ ID NO: 13125 - DNA, 623 bp, Gossypium hirsutum
  misc_feature (45)..(48): n is a, c, g, or t
gtcaagagagctaatgtttccaactccaaagctgtcaattaatcnnnnctatttgctggatgcatattggcttttcggttccatgtgttcacactccatgactcttcaatgttgagctttcacacttgaattggctgctcattaccctcttaattgctggtcacttttcagccaaaagttgcaacataaatgagctaatttatgcccattggccgaacctagctatccatgcatcatccaagtttttccaagtccaatgcttcatctagaaggtgtctaatggagctccatgttcagccgaatctagctagttcatttaagtgattcatttgcttaatttttaaggaatgtaagtgaccattcggctagcttaggtgttgcttataaatagctgaaattttactttgtaaaggacttttgaactttttaattaacaaattgctgccaaatttgggagggattttttctcaaatttccttcggaaccccaaaaaattatctaactttttaggggggtttttccaaatttttttttaaatttatccccccaaaaacccaaggggggggtccccctttaaaacctttggttcaaattttaaaaaaaaccgggccagggcccctttc

SEQ ID NO: 13126 - DNA, 548 bp, Gossypium hirsutum
acattcggcgatcctaactatggatccatgtgtgaggaacgaatcggggtgaaataaaggtttcgaaattatcgaatctttattctgagtagacagcaacgcctcagcaacgagtaatttgatctactatcgaaccaagctgcaatctatcgtgactccgacctctacgtaatccacccagttgacaatgaacggaaggaatccccaaaatttttttggaaaagactttgctttgacggctgctagaccccaagcaaagaaaaaataaaatttttatatctattttttagggtttctagaaattaaataaatataacaatgttttaaaccgaaaattataattaaattaattataataatgatttcggtaaactatatatttatttgaatttatatactaaccaaattcatgttctcattatgcgtacaacaaccttgtacataatgtgttcgatatttgattaccgaattaaattgactaatttaattcaagcgacaaccaaacatgattccaactatgttttatttccgttcatttcaactatagg

SEQ ID NO: 13127 - DNA, 542 bp, Gossypium hirsutum
  misc_feature (430)..(430): n is a, c, g, or t
  misc_feature (438)..(438): n is a, c, g, or t
  misc_feature (444)..(444): n is a, c, g, or t
  misc_feature (510)..(510): n is a, c, g, or t
  misc_feature (515)..(515): n is a, c, g, or t
ttcgtgaaattaaaaattttaagatcatttcataaaatattttctttcaatatttttttttaaaatagtcaatttaatttaaaatatgtgataatattttaatttaaaattacaaaaaatatatcatatataaaacttcaaattatgattttggtcattagatcatattcaatttgaggatatagtttatgcacttttaataagtaatgtcttaataccattaaaaaaatttgtaattgacttatgcaatttttagaaaagtccaattcatgaggctaagctgatacttttaaattgacaatttagttgaaaacaattactttaataataataatttcatcatttagatgacgtaaaatatttctacttttataattctttttaaaattccacttcagtctaataatgtactcttttttttttggagttngaacaagngattgnagggaaggggaagaatttaacttattttttatcttatattacagtattattataatatctaatctnaaggntaccgaaagaaaccgccctccaaaccc

SEQ ID NO: 13128 - DNA, 356 bp, Gossypium hirsutum
taggataatttaatttgctattacactcaactattgaagctagatgttttaaagcgagattattggttccactagccctttctgagtattttatcgttcaacttttaaaaatgacttttcgattttgtttttcactttagtcctcaatgtttatatttttggttaatttggtttcttcctcttttttttaattaaatttgaccttcaacttaaaaaagaagaagtataatttaactattaatcttttaaaaaattaaatttttatttgattttttttataattgttgatattgtatataaaataaatagtatcacgtcgttatgaagtatacatagactaccacgcgggttgccat

SEQ ID NO: 13129 - DNA, 532 bp, Gossypium hirsutum
tttagtttgcttgcttcctatgctgtattaacagttctttgaccgtgagttgccattagcactaaccaaattcaactttatgctgcttagactcaagtggctgttggatatgaatatgtatttgtttgattatttataagtttttttttcatatatttatatggtctttgaaggatcatattataaaggttctttgaaagattatactcagtaatgtatgaatgtgtaggatgttataactaaaaaaaatgaagagtaagaagatagaaaataaagtgtagtgatgggaagaataaactggcagccattgagtatggatgtgttccaagcttcttttgaactttgatttctatgcacacgacttcatttcctttgatttgaatatttttcaaatcttttttgaaaattttcatctattttaatggtcatatctttgtccaaaacatgttggacatgtgtacttaaaaaagttaatagagtttgagcaacgtaaaagaccgttatttatgcagcaaaggaagcaagcagacta

SEQ ID NO: 13130 - DNA, 565 bp, Gossypium hirsutum
tgccttactcagatccgttttcccgtcagcttttgcgccaaacttggcaacaacatcaatagcgcctgattgaactttagaggctgaaatgaataataataaaagcacaaacatggaaggaacaatattaaggtgtggtgccatgtttttatttggttttgaaattacacgaagaatggcttttccttttgtttttttccaaatatatagaaattttgagaaaattacaaccaatcaaatatattactatttaatcaatgtggaaaagtcatatggccaagcttcaatatctatgattagcttgtttctttaatatcaacttcgcacggttagatagttttgtggttaattttttcacaactttaataatttaaactatgtgaaaggattttattatggaaagattgaaaagcattattttacattttatcttcaaaataatatctttactagatggtggcgaatataattatgttccgttaaatttatcaatgttatttcgaaaagtataatcctaattattcaataaaaattgttgatacagtaatgtgggttggtggttgac

SEQ ID NO: 13131 - DNA, 551 bp, Gossypium hirsutum
tttgggcctggtttatcctatctaggtattgggccctgttgtaaatgggtattcgggtttgggcctattgtaattgggtgtggtatttgggttttgatgggctgtaaatgaactttatattttggactatcgtttattgggctccgggctaaaattgggccctacaactataatgcatattttattatattaaaaaccacaaataaatataataaatatttttattgtattaaatataatttttaaaattttatactttgggttcgattatttattggatcaatttttttaagttttggataatcgatttaattgttattggattaataatttaatatatataattatttaacatatataattaatataatattttttataacataatatattcgggctaggtttgggtcaaaaaaatcttacccaatgctcggctcatataaaaaatggtcccaaattttacaaaaaaattattttttagattttgtattttattcaaacccttttattttttaggtaaattttcaaatttataccgatgacccgatcca

SEQ ID NO: 13132 - DNA, 643 bp, Gossypium hirsutum
gagagcaaacccatggacaaaattcagccacccaagtgtcataagttgtgtaaagttgaaaagataaaaaatgttaaaatgtatcaaatattcactcaataaaatatagtaataccaccaaatcatagggattaacgaattacgtgaatcagtcaaaccagccgcaatctttaattcatgattatcttaaaattttaatgaatgacaatttctattttaactacagaaagagaaaaccagaatttactgtttcaacctatatatttcattttactttggtaccaaaaacacaaatcattttactttctttaaaaaggaaattttgtattctttaatcatcgcacatttaataaataacttctaatattcatttgattcaacttttctctctcttttttcaacccgtttgattcttcttcattgttttactcatcgacggtgccaattttctatctagttactgtctacctttttcttcctcctaccaactctctctttctttattttcctcattcactccctatgtcgtttctcttttccatttgtagatttgttttgtagacatcttcactatcttcaaaatttgcgttggagagataacacaatgtctattttcactgaatctctatgaccaccaaccgat

SEQ ID NO: 13133 - DNA, 605 bp, Gossypium hirsutum
tttacgggtcagatcgaacttaagtacgatattaatatattttatatttgtttaaattcaatttgatttaaatctaaatttattttaagtctatatatgttattttaattttttttaaaaatatatttattttattttattttaatatttaataattttatatattttttatttattaatttttttatataatcatcttaacattatttttgatatttacaccagaataatattatatatttagtatgggaataacttacataagaatgatcctaaaaattaaggtttttaggcaccaataaaaatttgccacatcatcaaattttgaatatatgaaattattattatacactcatcaatagataaattttttatagacatttctcaccgtattattcatggtttttttcaattatttaattatatttcatcaattttttctatgccattgacacataatttggtaattttttatcctgaacctcgaatataaaatcccaagccttaaatctaaaacctaaaaccttaaacccgaacctataaccttgaatctttaaacaatgaacctcaaactcataaacagtaaccctaaacccttaaacgtg

SEQ ID NO: 13134 - DNA, 659 bp, Gossypium hirsutum
aacaactagaaaaatataaataagtaaattaaagattatcatactaaaatatctttttttctcttattttgttttgaaagagttttcaaaaataaatggttttaaatttatgtgctctaacatggaattagttatattgtaataagattttaatttgacatgtttaactttttttaatttaactcgaacaatttcattcgattcaactcgactgaaatttcattttactcaattcgattcgaaaaaatgtcaaagcaaattaggatgatgaagtgagactcgaaactttttcacccgattcgatcaaatgatcatctaatcaatagcttgagctactcgagcttggctcgataattacttaatcaagttcggttttttttagttgaatgcgagtagcttggaaataccagtgtctcatttacatccctatttagagctataaaaagggatcattgaagccattctacacatatacaagttcaagaaggccaaaagatctttgcaaaaatatctgaagaagtcgaagaacttgaaaaaaatctgaagaaggccacatctgttctaaagaaaagctgccttccaatcctgttcagccgtggagaagaagccaaaagttgttcctgaagatagctagctttcaatccaaatcaactgaaaaa

SEQ ID NO: 13135 - DNA, 551 bp, Gossypium hirsutum
ttatagaatgcgaataattagttgttgggcttactttggtagatactttgagaaataaaaaaaaatatttaactatataatgtattagtataaataaattatattttaataaaatagaattaaattattttaaaaaaaacctcttcaaaacaaagtttaaaattaaattatcatttttaaactaattacataaataaataacatatttaagaatttatggattttataattacaaaaaattaaattaagtaatgtgaagtcaaaaaaataaatttctaaattaggaaatattataactgtctttctccgattctctcctatgtataaccttaaaaaaacataaaaagctttaataaaaaacattactaaaaatgataacaaaaatattaataatgggtcaatatttgacaaaaaattctaaaaattaaagatttaaattactttgtttttactttctcaatcatattatttttaaaatgacaattattttaagaaataaatataatatattttaattattacataaaatcgaaccggtacatcgcacggga

SEQ ID NO: 13136 - DNA, 402 bp, Gossypium hirsutum
tctgctatctgacaatttcgacccttcttcactgaattaattatctcatcgtacgagattcggatgatgtttctgcttatttctcttgaaaatatactcattaaggattttaaacatataaatttaagctcttaattatttttctccaattttttatgattttccaaagtcaaaacaggggaacctgaaatcattctgaccttgtctcactaaatttattatatctcacaattcacaatcccattgcttacactgtttcttttataagaaactatattcaacaagatttaattcaatatttttttatcctctaatttgatttccacaatttatggttatttttcaaagttagcctactgctgttgtccaaaactattttagtgcaagatgtttataacaccc

SEQ ID NO: 13137 - DNA, 608 bp, Gossypium hirsutum
tggtatcggagcctaggttgcacaactcgggtgtggaatgggtttacaaaagtaaagatttttgaaagggaaaattttataaagaatacgaaaaactcgattttcaaaatttagatctttagaaggtggtattctgaatctccggctcaagtctgcaagtattctgaatttttctgaatattttcctgaattatctgtctgtactgaaaccctattaggatactctagataggatgatactgaaaccatagaaaaaattgataagagactgaaactgtagctagactttgattctgcgaaaacaaactctgaactactgtctgattcataaaacatctgtaataaacactggaatattaattgatgcataaaaatatgtaatcaagataatacgatatgagtacaagaggccgtggacagagccgaggaagtgctcgagcgagatcttcatcttcgagacatatgctgatggtggatgcgccggtaccactaacaacagaggtagagtctcatgaccgcgatgccgaggatgatgccctgtcacaggcaatgcttcatgttctggaaagggttgtcggggtaagtacgggcaatggagatcggagatc

SEQ ID NO: 13138 - DNA, 532 bp, Gossypium hirsutum
tacattagaggtttccgtgcatggaatgattacgcgtgttatagtgcttgtgaaaaataaaccggtgatggttgtgtcagtgtagggaatggttacgtgtgttgtgatgcttgtgtgaaataaattggggatgaatgtgtcggtgcaaggaatgattgcgcgtacagtggtgcttgtgtaaaacaaactagtggttgttgtaggaaatgattgtgcatgaggtggtccttgtgtaaaataaactggtattgtatgtgttgatatagggaatgattgtgtgtgctatgatgatgatgtaaaataaaaaagtgtttgtgacaagaataaataaaccatactgaccgagaggttgcaccacaatagggttctcttgtgcatgtggcggagatgttgatccctccacgacatctcctctcgacctaagatagataggccctcatcttggcctcttacgatggcgttgcctactcctttctgcagtcggtaataagtacggcttctctttatgcctgaagcaatccatgtaattcga

SEQ ID NO: 13139 - DNA, 603 bp, Gossypium hirsutum
tgcggttatcacacgagcacatgagcatgcgtgtggataagtcgatacaatgacaaaggtcaccacgagcgatctcgtggtcttaggctgtttttgggccaaatggaccggactgggtctagttggcccaataggccatgggccctacgcgagtaaattttcctgggtggataagaaaaaatgagccggccatgatgatggcatggccaagggaaattttgggcttagtgggccacacgagcgtgtgggcccacttacaccgttatgaccacttaggttatctgtgtcgctcgaggcgactgtagaccatcagaaaggttgttaaatgactgtagtgcccctgtaaggtaaaatgaccgtaatgcccctagagggtaaatgactattttacccctcatgggtaaatgactgatttgtgctatggtttgattgacttaactgtgaccaatatgactgattctgagcatggcatactacattcatgacatactgcatggggttgggatcttgtattggaggaagtgattgatatgtaagggtcgcacgagtcgcatgagacgaccatagacccaccgatggcttgattatgtgattggcagatct

SEQ ID NO: 13140 - DNA, 575 bp, Gossypium hirsutum
  misc_feature (568)..(568): n is a, c, g, or t
gggcgagtgattttgtgtaatggatggttatttatagatgatattcacggttaaataatactttaaaacgattttcgattcaaataatttaattattatttttagatgaatatatcgatggatcaatttgtgatctaattaatttggtctaaaagatgattttgagaaataagcataaaactttagaaaagaaaaaacttatttgttgcagatctctcttccatctctaaactctctttttaaatatgttgtatggtgttttaaggagtaaatgaagtttggtggaaaaaacaagaaatttaaagtaacagcttctttcaaaagacgtgagaatttggaagagtagaatgaaagaaattaataataaattaatttcaaatattttcttactagaggaaatgatgaagtggcttatttattgtgaatcgtggaattgagaaggtttttttttttttatttttttgagggtgaaacggaaaaaaattgggtgaacccttggaaaaacgggccgaattcattttaaaaaggatgggtggaaaaactggaaaaaaacccgggcctggaaacntattaaa

SEQ ID NO: 13141 - DNA, 623 bp, Gossypium hirsutum
  misc_feature (617)..(617): n is a, c, g, or t
tatgtcggctttgtgttccattagtttccaataaaacaatggatttggatatgttgtatacgaataataatcattaaatcaaaatttatgtaataataaacataattatgttgtgtaaatgacaacaagacatgaatttgttgagttttatatctcttccttgtccatattacatcaacttaaaatgacagaattggaaatatgattttggatggtaatgtaagttgattccttgtatggaacacgatactattttgctatatatatatatatatattaaaaagacaatagaagaatcgagatgttttcaaaaaaatatagataaaaataaataaataaataaatacgtaagttttgaaacaccgtatcaactgaaatggaggagaggagggttttttgatgacgaaacagagaagaagaaaatcatagagtgaaatgtctggagtgccacccccaaaaggggtctttagatatctctctctatatatggagttttcgggttgaacttgaagtcggattatgacatgttttattataattgtattgagagttaggatttaaatcatgctgaaatgcatgtgattaattaagcaaattattgattatccacatctggncatgtg

SEQ ID NO: 13142 - DNA, 664 bp, Gossypium hirsutum
ggaagtaaccaataagctctccactcaacatcctcctcttgaagattttgaagaatttccatccacttctccttcgaaatgtcgtctctcctcggcgtagcgactatctcctttagtggtgaataattttcagagaaaacttgatacgaaactttatccaccttccaaaagtgactgtgaaaccatgtgagtagaagctgtgcacatccaataaatctaccttcacccgtcttccggcatgcactcaatgacctaaaagtttctgccaaaattgctggaatcggtgtaaccttcttattgagccggttgaataaatcaatgattgcttcatccacatactccaagggtttagggaagacaaccaagcagtatatacttaaagcaaaaacatctaaccttttccttacatctgggtgtgtgagaattgcatctttcaagcttctccaaggaacgcacttactatcccccttttacttaattcgtgcgacaacccactgctcactcattcctattacactcatcagcttctttgaaaaggttggcacatttaccgctctcgaatagaccctgtccacttgaaactttgaacatcagagtaaagccatatattcctctattgtaggcaccaaatcgaccttcccaaacgtaaagcagctgtaagcag

SEQ ID NO: 13143 - DNA, 568 bp, Gossypium hirsutum
taaagtttagggggcaaatggtaattttgcctagagcattaattaaatgcattagaatatgaaatgaatgaaaatgatgatcaaatttatttataaagatccggacgactcaaatatgagacttgatcgtggaaaagaaaagatatcggattaatgaaattataaacacaaacaagcaatgaggtaagttcgtgtaacttgaattatattcttaaatgcttgaaattgtgggtttttgatgaaaatatgatttgaatgttcatttcatgaaatttgatgaaatattgataattttgaaaaaaggataaaaaatcccggttgatgaaaggaaaaattctatgaagctctgaaaagaaattgatggcaaaaaggatgatccccgccggggggatcctctcctgataaaaccccccccaaaaaaaatagtaaaaagaattattccccccgggggaatccaaataatggggggattttttccggcaggggtggttcttatcaaccctccttataaaaattgttgttgcgggggattattccggctggggtggtccccaccaacctctttaaa

SEQ ID NO: 13144 - DNA, 621 bp, Gossypium hirsutum
  misc_feature (13)..(13): n is a, c, g, or t
ctggcgtagctanccatgaaatagataattaatgaacattaaagctgagaaaagaaaatggaatttggtcatgttgatggctttgggtatcaatcaaaatttgagaagggttgttaaagatgcatggtaaaagcattgcttaaataaatgaatgggtgaaggtttttgttagggcaagtcaactcgtcttggtcgtttccataaataaatgagtcctttccatttcgttcttgagccctccaatattccttttttttacttcttttatgatagtccatcaaaatttatttatagtttaatggtgtaaaaagccctcaaactttttcaataaaatcaattaagctcctactttttttttcacttaattaagtacttgaactttcaaaatgcataagaatttaccaacagacaaccagtatagaagctattctaagctttaactgtcaataccttcgttagcaaaaaagaactctcccaatttcttcgatgataacaaagtctagcaaaaaaaatgaatcaaaaatcttctctcctaccctattaatagataactcatgttcaaatcccaataaaaattatctctaatcattactcgttctcgcacgctttcactaattaaaa

SEQ ID NO: 13145 - DNA, 525 bp, Gossypium hirsutum
aatatgggcatcaaattctaaaaactggagttggtggccatttgagttgagatttggagtactggtgcgtggatccaatttagttgggtgtttactctataaagtaattatattattttatataatttatataaaaaaatataaatataaatatacaaaatattatatgaatttaagtatatgatttgaactcaagtacttataatttttaatatttgtattttgccattcatttaaagtctcattttataaacacatttatttcataattttattttcactcatgtcgtgtcatgatattatatagttttaattaatttgatggattattagaaagtaataaacttttttcaataaattttaatcatattcaaaatatctatactatatatggtgtcacctttaactaagttccaattcacctttgaaattataaaaagcttattccttttacaaatgaccaaattttgataaatctaaaaaaattcgtacttaaaatgaggaccatgaatttcactacaacaa

SEQ ID NO: 13146 - DNA, 567 bp, Gossypium hirsutum
  misc_feature (518)..(518): n is a, c, g, or t
  misc_feature (521)..(522): n is a, c, g, or t
  misc_feature (554)..(555): n is a, c, g, or t
tctatcctgaagaagaaagagattgttgaaactgacgccgtcaaattgactatgaacaaaagaaataataaaacctaagaacatgctagagaggcagacaaagtcgtgctagggtagcagatctagtttttacaagagttttttttatttatatttataatttaaagtttaaatttgtattaatttttttggttggataactattcttttattttatgcctaattattgtaatacatgtatagtaaataattcccccctcatattattacatgaataatcaaacaagccatcaatgttttaacttattatttcaactaaagcctcatttggttttttttttttataaatttgttagataaccttttttcactcatattgtaggtgtgctataatatttaagtgttcgttggaattggtgtcactcatcaattgagtccaagttcagttgtgaaattaccaaaatctcattcagtcattctttttataaagtaataaattttattataagaatgttttnttnnaatactttctatatgaaatttagaaaaacatnnacaaatgataag

SEQ ID NO: 13147 - DNA, 553 bp, Gossypium hirsutum
  misc_feature (513)..(516): n is a, c, g, or t
  misc_feature (518)..(524): n is a, c, g, or t
  misc_feature (531)..(535): n is a, c, g, or t
agtagatttagtgagctaaaagagctaacaacgagctcaatgagctaaattgagctcgagtgggctgaaataactaattaaactaacttaattaatcaactaattttattctagcaaaataaaatgcaaactaaagtaagctaaaaacgagcttgtgagctaggaacgagctcattgagctagaattgagctaaattgagcttgattgagctagatcgagcttgaaaggatggcgagccttgcaatgtgagctgaaccacgggcgttcctagtcgggttcgtatcactaaccaaggagctagtggccgatcccttagagctaccattgggaccagttacccaagcccgagctaagaagatccaagaagctatatcaagttatattaatcgagcttggaaagaagaagtgaccaatcattgctggactaggtcaccaagcttagtttgcagtgttttgcaagctgatttagattatcttagatcaatggagatcaattcggcttgtttctaaannnncnnnnnnngaggcgnnnnntatgcataacaaaggccc

SEQ ID NO: 13148 - DNA, 610 bp, Gossypium hirsutum
  misc_feature (571)..(579): n is a, c, g, or t
  misc_feature (583)..(590): n is a, c, g, or t
  misc_feature (594)..(597): n is a, c, g, or t
aaaatatagatacgattaaaacttataatgaaattgttaaaaaacttaattaatatataatttgaggtattttataaagataaatataagtaattttttctactaaagaaactgacatgatacgataatataatggttgagggagctggatttcggacccttgattgatagttcggttaaaatctgaattgaactattattaactgaattttaaaaatctttaaccattatctaaaccaaaagtttctaaaaatctattaatcgaccaaaataaatttagttaattcgggcggttaatcaaattaatcggattttttaaatttttttgttcaaataacttggaacatagaagaaaacaaaccattccaatgcttttttttaaaaaaaaactaaaaaaaaagcaaaaaataacacaataacaaaactaaaataagtttgactggtgaaatgaaagaaaataaataaatctactacttagagtgatgaaatgtaaaaaaaaaaaaggaaagtttgaagggaaaagattcaaaaataatggtaaaggctcaagaatcaagttgtgcctaaaccnnnnnnnnncctnnnnnnnncccnnnnttcgttttttctc

SEQ ID NO: 13149 - DNA, 569 bp, Gossypium hirsutum
tagaggaccaaataatataatttaaccactttaataaatcaatttatttaattaattaaaacccaatttattaatgaattattaaaatgaattattaaatataaatttatattttatcatttaatttaatcatgcatggcccactttatagcttaaaaatataatatgctcaaattaatataaaataagccattttatgcatgaaaattatataataaagtataaaatcacattttaataatttctatatcctaatttcatatttttgcgtatttcattaatttattaaacaattacttggttttaacaacaaatttaagtaaaaaggtaatgaattatatagaaaaattcctatatatttttcagtttacaacctggacaataagtcatgcttttcaattccaaacttaacctatttcctggcaaattaaagtggagatggtctggactagtcaaagttaatcgtggagttgtcgattttaaagatggaaaaataggatccactttcaaagtcaatggtcaacgcctgaagtattattttagagctcctataatgtgcgacaaaaggt

SEQ ID NO: 13150 - DNA, 681 bp, Gossypium hirsutum
cagaagggaagtattttttttttaatgttgctataacattgattacacgatatacaaattcacatcttgatatgaacttaaaatgttatttgtttgtttcatacaatctttaaaaccattcactattttgttcagtagctttgattagtgaatatgtagacacacacacacacacaagaaccactgaatatagaacatatgccattaagattgcgcttgttcagcctttgaaatcaaaagtttcacaaatcatcttattttacgctgtacaaaatagttttgacaatcctacctaaaagaactgaaattttcacaaagtatttctccaactacatgaaaaagatgaaaactaataaataaaaaacatgatcattttctaaatgcctatataaaatttttaatatcactatactagcgtactccttttgataattctttttattgtttcatagtaaagataaacatttgggtcaactatatccgtacttgttatgattttttcttttatcttttaattataaaaagttataaaacaatcacttttaactatttgaattttttttctggtcaccaactattaaataattttaatcttcattatttatatatagggtcaatttagtcttgattctaaaaaaacatttaacccttaacatttacacattgagcaatgaatgaact

SEQ ID NO: 13151 - DNA, 655 bp, Gossypium hirsutum
ttcagcagcctagacaggttaattaaattcggctgaacattaaataacagcttaggcataataaatcagcaataagacacattaattaattgtaataagacaaacacatttatgctatgtaataattaaaacaaattaaacatgcattaaacaaacataattaaaatgtctagatttcttaattaaatacttagtaattatttaagctaaaataactaactcaactaattaatttattccagcaaattaaattaaatgagctagagagctaataacgagctcaatgagctgacttgagctcgaatgaaccagaaatgagcttcatgttgcacttggggccctcgtgtttaggccaatctcgacggcgttgggttgtgtcattacatgatgcgatcgggatcacatcacttgcctaaatgcttaaacgtgtatcggttggtatatccgttatgaattacacgtttgtcaaattgccatgggcggcccaaaagaatgtgacccgcatgcatgggaactacgtcacacaccaattcatcttggcatttcccgatggaaaatgctatcacggcttgcttcgttaccttaagttcccctctgtcattcaaccattgcaacttatacggggttggatgctttgtcatagttattccaagca

SEQ ID NO: 13152 - DNA, 558 bp, Gossypium hirsutum
gctcggcgccatgagttttttttatttgatggaaagaaaaaagaagactatgccttcgccatctgaaatatgaattagtaagtaataatagcatggcacttcgaattcgatatgatattttttttgatttcttttttttttcaaaccattaaattatgtatcgaaagagtagaatgaaaaaaagggcatttccaattttatcttacctttcgggggcccttcccaccgccacaaactttttttctttcccccccaaaggctattaacaatatttataacaatatttaggttataaaataaaaaagaacaaaaaaaaaaaactatttttttctttcttttttttaaaaaaaaaaaaactttgggaatggcgaatccccaaacaaaaaaaatataaaaagcaccgaacccttcaaagatttttgaacttttcccaaaaaaaaaaaaagggggggaattggattatttaggggtccggggccaaaaaaccccccccaatttttcccttttttttttttccaagaaaaaaaaaaaaaaattcccttggaaagcccgaaggca

SEQ ID NO: 13153 - DNA, 423 bp, Gossypium hirsutum
agtcaaaggttaattttgagaagataagtgtttcacatttattgtactttagcaagctattaaatgtttattcaagtaaaggcttgtcagtattttattcatgagttttgagcgagcacttattatgttcaagtgaggaacttatttcaatgtaaattcattttatgtaaattgttcttgttgaccagtttcgaactaagttttcaagggaaaagtatcagtgagacgagatatatagattgggaataagaatgaggttggacttaaatcgcatatcgtacttattgatttacggtggactactctctctataaggtctcatagacgtttgaagttttcaaactgtgtaaccaaactttggtatgcatctctcgatttataattgttagtaaggtagccccacaatatctaaatctgaaagga

SEQ ID NO: 13154 - DNA, 523 bp, Gossypium hirsutum
cttctgaaacctctactaagaagggaaaagataaagtcgacgaggaagaactcggaagttctggtttgtatttctataattcgaatctaattattaattgttatattttgatttaatgtttatggtaagtagttgaggtgagtatatgacattttgatattgaactaaattgaattcattgtacatgtgattatatggaaaattgatatttgatattgattgttattgaattgtgaaattgaaaccctattaactgtatcaggctgagtcgaatataaatggcatgccataggattggaagagttcagagattcttcaactacgagtcgatgagacactgggtgtcaatctattacttccgattaattcgatgaggcattgggtgccaatttacttcggtttagccgatgagacattgggtgtcaacttattacttcaaattatccgatgaggtactgggtatcaaactgatgtgttttggttagatccgtgtatccgcccaagtccaagtcgtgttattgag

SEQ ID NO: 13155 - DNA, 505 bp, Gossypium hirsutum
gggtctatctcaggccatttgtaattagaaaaacgttgcaagtacagtccctgtgacgttctaaatcaacacccaaatcttgtaattccaaagataacaaaaaggaaggattattttattcccttggatgggaatgttgtgtactactcatcaaactatgcatggggaggacccaccattgcagcatgcttgcatagcaggaaaaagtggtttactcactttacatcaatttatatatgttggttctttttatggacctcaccctggaactcccctatatgcttagccatatgctacttgatttcattgaaactggcttgtggtttttatttattttacggttaatatattatttgatatttaaatttaatttcgatacttgactttttctttctcatctaaatacctcaatttggttttaatatttaaattaagtacccaaccaaaagtagcaaatggtatgttacccatttactttatcataaccgaacaagaataggtaggg

SEQ ID NO: 13156 - DNA, 681 bp, Gossypium hirsutum
cttgaggcaaaagtgcaaatatgtgaaagtttaggggtcaaaatgtaaatttgtaaaaaaatgaaattcggacccatatgaataatgtgactaattattaagctaaatgtgatattatagatcaaggaaaatgagatttgggcatagattgggaatgaatgagattatggactaaattcgaataaatagccgtgctcgcattcgaggtaagtttgtatgtaaatcatatatcgattctttttatgttattatatttcgttattatatgagatgtggctgcctataaatgatcatttgatgtaaattataaatcgaaatagactatgaatgagtttgttaaatgttgaaaagtgaggaatttcccagttgaactttcgaaatagaaatgatacgaaagatccattgtgagaacacatgtgtaatactatgtgcaggctactatgtgtttaagatggttttaggtcacgtgtgtaggactaagtgtaggctactacgtgtaccagatagttaggtcacacgtgtagtaataagtgcaggctactatgcgtaccagatagcttcagttacaagggtggtaatatgtgcaggcaactgtgtatttgttattatttcgatgagttcaacgggaaattgactaagtgaaaatacatgtgaacatgaacatgtgatgataaagcgcag

SEQ ID NO: 13157 - DNA, 633 bp, Gossypium hirsutum
gataattgaaagtgttgaattatggaaaattctgacattttatagaattcataggttgttatcttttgtgtgagaataacggctggaaataaggattaaattgcaataattttattttattttaacctaaggatgaaatcgtcattaattaaaagtttaggggtaaaatgataattttgtttagagcattagttgaatgtattataacatgaaataaatgaaaacgacgatcaaatttctttataaagatccggatgacttgaatacgagacttgaacgtggaaaagaaaagatatcggattaatgaaatatctgataaatgaatcggtaactccggtaatgctccgtaactctattccggtgacggattcgggttaggggcgttacatttattggtatcagagctaaggtttagtcggttctcggaccgaacgtagcatatgtgaagtctagaaatacatgccattatataacttgtgataagataatttaatatcttccagctctgatgagatttattttacttaaagatagagatactttcccaaccgagctaattacgataatgttgaaagcgatactcaaatatgtgagcaaaagtaaattatgatgagtcggaactcatagaggtat

SEQ ID NO: 13158 - DNA, 644 bp, Gossypium hirsutum
tgttcacatttcggatttaatttttatattttaatttaacataaattgttcatctatttttacaatgacattagttagtccatatagttaatatcctcaacaattatagttaaaatattgacgtcaaattttctttaaaatatctttctagcacacacaaaaaaattatttcatcatgataagtttgaattagtatttttttttaaaaaaaatctaccctactattttgaccaaaataattaagagtgtcatatatttagattaactaataatattataaaagtaaatgaatcaaattatgtcaaattaaagaataattattaaaatttaaatttaaacataatagagggaccatagccataatttaacctagaataatttgtactcacaataattcgtcatttgatttgatattttaaaaaaatatatttttaatcaataaaaatattttcacccattatgattagatttaattgtacaaacatccttaaattatgacccccatgctaaattggtctctaaatgacatccccaaactatgattattagaatcattctaattacatcccaacctatcaaggttatattatttaggcccttagattactaaaaatcgttaatttaactattaaatggcatgctag

SEQ ID NO: 13159 - DNA, 1067 bp, Gossypium hirsutum
  misc_feature (136)..(136): n is a, c, g, or t
  misc_feature (248)..(255): n is a, c, g, or t
  misc_feature (453)..(458): n is a, c, g, or t
  misc_feature (468)..(468): n is a, c, g, or t
  misc_feature (574)..(574): n is a, c, g, or t
  misc_feature (576)..(576): n is a, c, g, or t
catatatggtaataatcaaattgcaattttgatccctcttctttgttcacatttcggatttaatttttatattttaatttaacataaattgttcatctatttttacaatgacattagttagtccatatagttaatntcctcaacaattatagttaaaatattgacgtcaaattttctttaaaatatctttctagcacacacaaaaaaattatttcatcatgataagtttgaattagtatttttttttnnnnnnnntctaccctactattttgaccaaaataattaagagtgtcatatatttagattaactaataatattataaaagtaaatgaatcaaattatgtcaaattaaagaataattattaaaatttaaatttaaacataatagagggaccatagccataatttaacctagaataatttgtactcacaataattcgtcatttgatttnnnnnnttaaaaaaanatatttttaatcaataaaaatattttcacccattatgattagatttaattgtacaaacatccttaaattatgacccccatgctaaattggtctctaaatgacatcncnaaactatgattattagaatcattctaattacatcccaacctatcaaggttatattatttaggcccttagattactaaaaatcgttaatttaactattaaatggcatgctagatcttatgtgtcataatattaaatgaaaacttaaaaaaaaatgaatattgtaaaaatgatgttttaaaaaccttattttacgggttttgaacttttataaaactttaccgttcattttttttcccgttttgctttgttttttatttttacttttaaaagttaaccacaacattctatttctataaaaatttatttttaaaagcagctacataaaaattttatctggcctttaacgggttttaaaaaaaaaaaaacttgatttatttaaaaatttatttgttaggtggtaattaaaagggtttaaagtttataatcaatttaaaaaaaggggcaaattttaaattaaatctaaaattttttccaaatttaaaaataaaatt

SEQ ID NO: 13160 - DNA, 456 bp, Gossypium hirsutum
attccttttgcatatgctgttttcgaaagtgaaaaccaagcatcatggctttggttcttggagttgcttgcaatagacttggaaattgtgagctctaccaaatatctttcatgtctgagaaacaaaaggtaaaactctatttatttttttttatgttgtttctatttagggattgtcaatgaattaagctgtttttttttctaattgcagggacttttagaagcaatatgtatgttgtttcctaatgcagaaataagacattgtgttagacacctacatgtcaatttcaagaaggctggtttctgaacaaaagaattgaaagatttgctttggaaagctgccagagcaagcacaacaagggattttgaggatgccatagatgaactggggaaaaccaatcagcatgcttatgattggttgaaggaaaagaaccctactcactggtcaggccaatca

SEQ ID NO: 13161 - DNA, 517 bp, Gossypium hirsutum
  misc_feature (56)..(58): n is a, c, g, or t
gactttagtcatagttgaattggtggttttgcctcttattatttgagcaatgaatnnnacctgaataaattaggcaactattctattgcaatatctataataagtgtgtttccttttgtgcttcacaatgctaccaattttaggcctctcaagcaaacatggttgtagattacaaggattggcaagttcctcttggacgtcggtttaggtatgctttttgacattatgcattgaagatatgaacatatttccatttaagatgagcatatgtgcatatcgatgcaaaattagttacttgaaggaaagagttttgtacacaattgtaattttgttcttcctgatgaatgtaagacatattctctgcgagttctgtaccatattttgctaacaaattatgtatttctttttctcaataaaaactattaaattaacggaataactttatttatataatcaacaagaaatttcccccaactaatccattgcttgcctccagatcactgaaactaatggatgg

SEQ ID NO: 13162 - DNA, 604 bp, Gossypium hirsutum
tttgcagcaaccacgacactaaagactactcagcaattttttcttttccacttttgtctatcgactaatctgtttcttgatcatttaattcaattatcaacttcaaataccttataacatccaaatacatgtacattaccctttaataaatttttatattataccctaaaattttaccttttattcaacttagtctctaaaatcgaaacttacatatttttcacaattccaccaaatacctttgtgtcgaattcaatatagtcccttgacaacccttaagtaattaaattttacatatattctttgctaaatttaatactttatcgatttagtcctgaacttaaaactaactaaaattactttacaaaatagtcttatttaacaatcaaactcataaatctatcacttaactggtttttttataataaataacccaaaaaaattaattaattattaaaatgacttatttttttaattaaatacaaaatgacctaaaatctgcagtaaaagctggtggagccaaatgatttggcgccaccaacatgccacgtcaacatccatgaaaaaataattaattttttggtggagccatggagaatgacgc

SEQ ID NO: 13163 - DNA, 603 bp, Gossypium hirsutum
atttgtaagagtccttatgcggtaattaagagattttaattctgagtggacatttaggtgcatgattaagtgaatttaatgataaatagtaatggttaaaagtgtaatttaataaataaggtaaattaaaataaacaaaagcaaagtatcatcttcttattcttacccctaccaattttgtaacctaaaaacacttgaaacattcaaccatctttctcccttgtaagtaagtgattttttattttgtttttaatgatttttatgtttttggagtcattgtagcttaatctagctagcctagggactaatttacaaaactgttaaaaggttagggtttttccattattgatatgatatcatgttgttttttatgttttatgaaagaaaatgattagttgtttacagataaaaaaatttggttaagtgatttttgatgaatttgttaattacggattaaactgaaaatgagaaatattcagggtgtaatttttgaaataatgaaatttgtgagttgctgtgagcttgaatgaaattaatctaggcttaggtaagggtgaaattgtatgaatttcattttttcgggcataaggactaaattgtaaa

SEQ ID NO: 13164 - DNA, 313 bp, Gossypium hirsutum
ttttgaatgtttagatgaattctaacattgtgaactttgttgcaggtttggtcgtccttgatattgtatcgcaagattttggatgcaattgaggataacgattatgataacttgaccaaacgagcctatgttggaaggactaagaaacttctcacattacccttagcatacactcgagctttgtccaaacctagtttgtaccttcgttagaatataaaaaagtaattttctttttttgtggtggatatattagatatcgttaaatatgatattaaagaaaataaatatgatataaaaaaaaaaaaaaaaaaaa

SEQ ID NO: 13165 - DNA, 624 bp, Gossypium hirsutum
tccacattagacttgaccaacgatttaatgcctgagctaatggttaagttacagatattctttactaaaatgcttacttctattccataatgtttcttcaaccattaaatcgaagaaaaaacgcacttaattttgtttgaactcatgtcttcatgattgttataataatagtggtatcttttaaactaaggatattaaagacattttgacaacacaattaaaacatttttaaagtttggcccatgatgactaatttaaaattcaaagataaaaaatggtaaactacattcaatattactaaattattagtaaatctatattttagttactcgatttaaaaaaggtacaaaataatcattgaacatttttatttaagttggttgctaaaatcgttgatgtatagctttatctattcgcacggcctgaactaatcgaaagctctctttctcattttttttctattgtttagttttattttcatatagttttgaacatcacgaatttacaaaccaaaatctaaacaagtttcttcttcaatctccaacattgatcgttagatcagcttggatctaagatatgttttctactcgtcaatgggaactgatttaccataccaatcgtcga

SEQ ID NO: 13166 - DNA, 611 bp, Gossypium hirsutum
tttgatcctaattctgggttcttgaagagatatataagagggagaaaaataagggtttttgagatttgggttattgagagcttaccttataggtgaagaggtcaaataaagaaagaactcttttttatattttacttgtgaatgtgaggttttagggcttgggtttttctactgttagagtgctgaagaagaagaggggaagaggaggagaaaaccctaaggcgtgtttggattggcgtcttttaatttatacgttctttagtttctccacagaagaaaaagaaatcgtgtaaaaaatggaaatttaaataagtttgaagaaatttatttagttttcaaactaaagagtaaagtattccaataaaaatttgaattatttctaaagaaaaaaaatagtctttacttcatgtattgatattttttatattatatttcgaaacatttatttaataaaaatagaaaaacaaaataatatgtggatagttttaatttacccaacctcttcaattaatttttttttgacattttcctagttgaatagtggcttattaattggtattatgaactcaattttacaaataaaaatgtaaggcattacccttgcaataatt

SEQ ID NO: 13167 - DNA, 643 bp, Gossypium hirsutum
tcaaggcccaatttaagggagaaatcaaaattcaaattagtataattcccatgattactagctttatccttatcacattccccaaaattaggaatttccgattcccttcctacctgtagccagacactcttcactatttgtgctcgtcgggatgtcccaatcgaccatacagaaaacagaaaagtggtaagcgcttgaactgaaatctcgcataaacctcgtttctcttaggcataactattcgcttccttcgtttcagaggttgctaaatatccacacgtactcgaatcctcatataaccttagaaagcttcgagttgatcctttcgcatcatagtctaggaatttcacaataaaatttccaaaaactttaccgacgcctcaaacatcaatccattgggtaaatcataaatctgtacctaaaaaccaacaaaaaatacgtccatggactcccataaactaccctaccaacgtccacctcataaaaaaacgaaataaaaacagcttatcactcaaatttgaaatagaacccccaaagggtgctagatattaaccaacgtagtcctcatcgcttggaactgaatcgtgcttgcaattagaaaactcccaaccaaatggtattcataaaccttcagccttggtat

SEQ ID NO: 13168 - DNA, 608 bp, Gossypium hirsutum
gctatcagtatttaaacaactttttcctaaaaattattaagagttaatgcatggtaaacagaatggattcatcagtcttgatatctattatttggggtttttactccttaggttttaattttagttttaggagtgaataattaatttaattttatagttttaacttttaattgagtaatttagtttgtatttttaagttggattgagtttgatacgattgttggatttgattattgagtatgaaatatttaattatttgggcttgggtagggtgcagattagagtttattaattaaaaaaataatcgaataaaatttaaaatcgaaaaccaaaaaaatgtattattttagtctaaaaaagtagttgataatacagttactaataaaaataggtagagaaaaaaaacaccatatgcaattttatttaattgttctaatgcatatttgttaggttattctctttttaatatttaacatatgctacttatcataaatattttggtctttgactaagttcatcatcatttgaatttgaatttgtatcctttaaggtaatcaaggtttccttcttccgtgtactctgctgagtatggattatctcaattccac

SEQ ID NO: 13169 - DNA, 509 bp, Gossypium hirsutum
taatcgatcagttaccgaatttagtttggtcaaaaattagttaataattttttacaactttaggtatcaattaattcggttcaaaatcagataattaatcgaaataaataatatacaatatattttttttatattcaatgtattttttgaactattattttttatattaattgaaataaataatatatattatatataattttttttgaactattaaaaaatgaaaacggacattagcaatgtgttttttatatgttttatacttattttaaccaaaagacaaaaaaaaatataaattttagttaatttggttaaccgaccgaattactcaaaatatttcggttcggttaatgtatttgaaaaaaaaaatcggttcatttaacagttaaaaatttttactttttaggaaattcaattaaaagaaattcagttctgttaaaaaaggaaaaaataaccatttgaacaaccctatatcaaagttttgttgggtttgttattgtctcaaggga

SEQ ID NO: 13170 - DNA, 322 bp, Gossypium hirsutum
  misc_feature (33)..(33): n is a, c, g, or t
gggccacctggctatgggcaatcatggttttantccatttggttattgtggtaatggaccgaatgattttgatggccgaaacttcagttctggctctcatgggcgtgcctttgatgttggacgtcgttcctttgggccacaccttgatggtgatttttggggccacccgtatggtgggcttactttccgaccgcgtgggcctagtgggtcggttcggtctcgatcaaatgatgatcatattctgcctgggccctctgctaattgtgtaaatgttgatcgctcctggaagactgtgcatgaagctccgtggcgcaccaagctg

SEQ ID NO: 13171 - DNA, 460 bp, Gossypium hirsutum
aactaagtaacgaaaacaatttattttacaacaaatcttatatattgacttacaaaactacaataaatgtgaaattgaattttgttcaataaaatcttcaatatgcgctttattctattcacgatttaacttagtaaagtactactaaaaatcctccaaatacgtgtattaaagcaagttgcaagttaagttgccactaaaattacatttcaatactatataactgtgttttataattacaattctgattttttttataattaattcttctattaaagtcactacacactattaatttatttggaaaattttgtaatcctataaattcttattttcatgtgactttacctaaatttaatggcatctttacatgatcctaaccaataatccttcacaatagattgaactttgattttttaaaaaatatttttttgtcataattatgtccattaatgtaccc

SEQ ID NO: 13172 - DNA, 631 bp, Gossypium hirsutum
gtggggaagatgaagaaaaggctaaaattatttttttttctttactttaatatatatatctaggttattttgtaaatatttcaaagttcttaattaaacattaattattcacaattaaccttaattaaacttattcatttaaataaataactatgttgatcgacccattaaaacattattggctaatttattcatttagccctcttaatttagtaaactctactttatagtttttacaattcaatcatttttaccaaattaactatctaaatgataaaatctcaaaaccaaattttaatttttcactaatgacctcgtaaatatttaaactaataaatatttacgaatagacacgttgaatttgtggttctgaaaccactgtttccgacaacacagaaaaataggctgttacaatttccttcaatggaataagcattgaactagcaaatcgtgatacatgaaaatggccatgtagcctctggtagggcagaagttctgttgcataccagattggcaaatcatgacaaagaaatatgaatggaatgaacgacatggcttgactatggactgcagtacgtggctaacatgaaaaaggttgtttgtatggtcacattggcatgatgtacacacc

SEQ ID NO: 13173 - DNA, 708 bp, Gossypium hirsutum
taccttgaatcaagcttgaaagtgccgaaccctaagtttcttttctttttctttctttttttattttcagcaatggcttataatatgaacatctatttttaattatcatatattatatcatatatattaatttatcattattttacctttttaaccttagtttaaaactttatattatcacatttcaatgtccttagccatccactacacttaatattgggcttattgcaactttaaggcttctatttaaaaagccaagtgcactctagccctttttggaaataaccactaaatttttattttacgcgattaagtccttttattaaatcagacacctaaacgacaaaattaaatcacgaaattttcacagacataaattcataaataataaacatagaaaatcattttaacatatttttctaactcagattcgtggtcccaaaaccaccatttctattaaggtctaaatcgggctgttacactttggtgatcgtgtgagaagggttatatatatgtgaggagatttattcagcagagaaaattcttctaaattctgtttatgctactttcttatctacaccgtcttcttcgtttgttccaaagaagagaaagttaaagatagtcctgtatggggcagtgatcgtaaggttaagtctagaatgtattgaatttggtaaattggtaagcctttccatctttctgtattcg

SEQ ID NO: 13174 - DNA, 651 bp, Gossypium hirsutum
gattgagctcagaccatgtgaaaagagacacacggtcgtgtctccaaaccatgtaactaactgatgtcatgtggaccaaaaatttcaaattttaaacaaaggacacaaccgtgttaccaaccgtatgggacacacagtcgagtggtagacagtgtcacaggccgtatgtacctaaaacatcattaaacttaagcaatgacatacaccttttcttataattcaagctataccatttacatctatttataccaactcaaaactcattaaaacatgtcaaaacatgctaattaaacattcaatctaagcttaaccaatatgccctcaatggcaccacattataatcataaaataacaaccatccaaatcattcaacttattcattctagcataaaaaattagcaatattcataccaaaacttgttatcacataaacacctaaagtgccattcaacttgacttaaagcaacacattaccaaaatactaaatatgaattaggcaatacatacatcaaatttgcatataagtacatctacaaccaagttaccaaaacataatcaatgtttacaaagtaaacttcctatatacatgccacaagtaaccatctttccaatttcaaaagtctaccgaatcaagaaacggtaggtatgagc

SEQ ID NO: 13175 - DNA, 565 bp, Gossypium hirsutum
tatagtttcggttattcgttggagcgaaatcgaattttcagtcaaatcaatctatattgaatttgaataaggtaaattttaaaacggacttgttcgatttaaattaaaattttaataataaaattaatatatatatttttttaattataaaagtactctttttatatatagattttaagttataagtacaatcacaatttacaaacaatacatatttggataacaatgattaaaaccaactattaaaaataacatccaaacagaactgataattagaatatatccaaatctagattagaataaaatgtataaaaaaaaactcatacatgatttacacataatgatacttaaatttgagatctcaaaattctgaggaccacatcgaaaatttattaatttattgttaaggaatgagataaaaatataaattattggggaaaaagtaaaaaatattataataaaagacttaaatttaattagtaaatttatagaggattaaaaaattttcatcatttaatttaaggggtcaaggtctctcccgttgggttcacctctatggtagttt

SEQ ID NO: 13176 - DNA, 599 bp, Gossypium hirsutum
tcccaattatctcaaatcgatgtctaatgagttaaaaactgtgtactattattttgtcaaatcatatttagagaattaaaatcttaacaaaaatatgaatttggatttataaatttttagtctagattaaatttggatttcaaaattcgttttaaagtaaaatctaaagtaactgtagttcgcccaatttgtccggcctacacaaagcaagttcaaacagtccttttacaataaaatgggcacaaaacccaaacccaattacaacaaaataggcctaacccagacttgattttgttaaactacataggcccaaattacaatggcccaaattagattcgggaaaccccagggtttctaagatgaactttgcgccgcagccaagcctcgcatctcccaagatcgtacctgcacgtcaagaaacaaaacggcatatggaaagaaaaatcagaaagattgtgattcaaatcaatgtaaacaagattttatttctatattatttgttttattatggctataaaaagccatcaagaaaactgtaagaaaaaaaggatcaataaaaagaatagcgaatatttcacaatacaaacagagaataccgg

SEQ ID NO: 13177 - DNA, 577 bp, Gossypium hirsutum
tgaaccaactggtatataaatgcaaaaaaagaaaaatttcaaaagtccttggagtcatgtttgaggctgtattggtcaagtaaattcatatggacttaatttattaaaatttgatatgattatgttattttatattactgttagttagaaattatatatatatataaagctttggcatcaaatggattaaatataaaaataatgaatatatgataaaatgaatggatgtgtgtgattggatgattgtgaaattgttatataattctatgatatatgtacgatgtttatttcaattaattattgtttatgttgagttgtatgtatactaattgtaattaagttgttgcaaaataacgacttcgatattgaaatgattaaattgtgaaatgagataaagctgagaaatgtaaatgaatatgagaatgtatatggttcacttacatgtatatgaaaatgttcaaaggtttggaatgaaatgaatatgaatatggaggcccgtgtgaacttagtgaatagctaggatacaaatgacatgtcattagggtttatgaagcacaatgtgttagtgattatattt

SEQ ID NO: 13178 - DNA, 600 bp, Gossypium hirsutum
gcaactaactaccaaagtgccccaagactgaaaaccttcacatttgttcgcctttctatggaatctaccatttttggggtgtgacacaatctttcaatacttttaaatggacacataagtgccttttcaaaaagaaataacattttatgtttgaaattttacaaaataaacatgattattcatatttgaaatcacctaacaaacataagttttcagcttaagacaccaaatgaaacatcatttccttccattgcttaaaagtttcattaactttttctttcttctttcacgattgttatatacataaatgtatataatatataatatataattctataccaatcataactatacatattaaaaatatcatgcatataataaattagcatttgattttcatcaaaaattaatgtatgagacactgatacttttttatgtaatattctataaaattataaaaattaaaatataattcaaataaaagaagtaaaacaataaattttacatacattttcttctataaatatcttcttttttttaaataaaaagttcatgagatgattggcctcaatgttgctccattattaatagtcattctca

SEQ ID NO: 13179 - DNA, 653 bp, Gossypium hirsutum
ggtataactgggttaggcagagaggttgtggagatgtacggttgaggtaaagagtaatcgaataaagtggtgggaaaaagtaagaagataggagaagaaagggagaaaggttgaaggagacgattcttagaagggagatagatccctactacatggttagtccaagccttgtataatcttaattttgtatctttaagtgtaacgtcacaaattgttactggaagtcaaaaatcaaatggttaagtggtatgatggtataggttaaagtaaggtggtgctatgatttgctttacgtcttacgtaaccttgaatgggaagttataacaacaatctagtgtgacggttaatgaatggactcactgaagaacgttattatgaatttgtttgtgaggttcttctaaagagtttatttatatcatctattgacttattgttaaatttgaacaattaagatataacaaaaatgtaagaggattgaagtatgagttttattcctcataaaataagtatgagtaaaaataacaatctcaactaaacaagcataaggttgctattgaaaaaaatgatgagtgaacagttagatgatattgacacttgaatcaacttagaaaccttcctaggctagatggggtaccaaagccttaaagtgcaac

SEQ ID NO: 13180 - DNA, 623 bp, Gossypium hirsutum
cgttgcttaatcaggtttattcgcaacaatgaaatttataatttaaatatgtatttgtggtattctttatttcatttgtttcagaatagaagtgttcatgtgcctaattagatcattgtatggtattagcataatttacgattgcccaagcttggcctaggccaaaatatggcctccaattttatctaaacttatccgaatttgtaaatagctagctaatcgaatataattttaagctctatcacattttaaaaataaaaataattaacttaatatttataagtttttattttattaaaattttaaacatagaaaacataacatgttttataatatttaatttataatattatagattattatagattttgtttttatgttatataaattatataatattataaatgggcaaggccgggccatgtttggagatttaactgttgaagcctaaatttgattcatattttaaatgagtctaatttttttatttaaatgttatttttagactattatttttgcccaaaacttctcaaatattaaatcgaacttcaaatttgaaagaataacccgaaattttaagtgtgaaaacaaaatagcatgaactacttcgagtgtagacttga

SEQ ID NO: 13181 - DNA, 639 bp, Gossypium hirsutum
agttagattcctcgaactgcctacaatttgcttgtaaagtgtgctatccaccttcggcccatttccttctttaattgactttaagcgagttttgttagagtgttgatagagttgcaatttatcatcttgaatttatttaaaaatattttcacatattttttttaggagaaattgcatcataatattgcatttaggtcaagaaaatagtgcatcttccaaagatcaaacatttgaaactaatctatcatagatcttttaaaataatcaaaccttaccctatcattagtaaaaataagattgttaacatttaaccacataatcaactttttcccattatcttcaatttgaacaaaaagtgtgttcatatgggaacttttgaaaccgcacttttaaaaaataacccttaatgcgaccataccaataacgtggagcttgttttagtccagaaagagctttctttaatagataaatcttatgcttatttccaaccttaatataatcatggggttgtttaacaaataccatttcttccaagtatctataagaatgttgattttacatctaactagaagataggccaagagttccacattgctaaagcaatcactgatttgatagtgtcatgtcttacaatttggg

SEQ ID NO: 13182 - DNA, 660 bp, Gossypium hirsutum
acgcagaagctcgtaatcagttagtcagtcagttatagaatcgatgtacacaattttcaaatagtcacacacacacccacatcacttagccactgaaacaaatactcatttattaggcaatatcacattaacgaatcacttaactaatgcaatgattgcataaaatagataagtctgagtcaaaatagagtcccgactacccttactaagacgtagtcaagggtcagagcacacagaatcacaaataggtcataaatcaatagaatacaaaaatttggcaaggcaggaccacaaggctgtgtggaattgcctaggccaagtggaggtctacacgcccatgtaggtgccacatacgcccgtgtggagggggcacacgttcgtatgaacaacccgtataactcattgtccaaaagtgctaaaaattaataacaaaggagacacgacagtgtggagatctcacacgcccgtgtgggacacaggcccatgtggcaccaaaactcatcaaaaaccctaaattcccaaatgcacacgcccgtgtacccaagggacatagccgtgtgaaaatcggctgattttcccaaatcagccacacggctgtatgcccaagccgtgtggcacctaatcctactcggaaaccctaaatcccaaatctacacggtc

SEQ ID NO: 13183 - DNA, 674 bp, Gossypium hirsutum
aacaccaatccaaaggaattgaattttttgctctatagttaccggatcaaattcgagttttccaattcaatctccatagtttatgaacaccaatatttcatttacacccaaggtaacctcactaaaaaaacacccagttcaaagctatgaaacaagagcaattagtccaaatcgacttaaatgcggaaaaacaccatattttacagacattaaaaacttaacccaaaaaagaaaacaaaaaaatacaaccttgaagttagggtctttatcagctccgcataaaagaggccatctttctttaagaagcgacttccataaacaatccgacacgcatatttcttgccaatcccgagaacaacaagccaatgaagagagagccggtgcctaaaaccccgaatacccaacaatcaaacatctgatttacattcaattcaatacccagaaaaagaaaaaaaatgaaatgagatagcaattaaacgaacctcgagggaagatgcaattttcagagatatctcttttggtagcgaactgtatgagtaatctgattgactcatgggactgttttttttgggattctttttgaaccgggttttgcgttttttttctgattcttgtcggctagggcatttggttttaatcttctcattatgcgaggttctctgtaatttaaaagc

SEQ ID NO: 13184 - DNA, 681 bp, Gossypium hirsutum
caaacatgaaccagaaaataaactacacagaaaatttgaaggggaaaaagcgaaatttgaatttaaagaccataaccaagtaaacatcgagttaaaattgaatttactcagataaacctcaaagggtgcaaataagaatctaataaaagccttggaacatgtcatgtaccattcaaaacactcgagtgagaagtacagaatcataaagctgaaccttaagaagtaaagtttgaaaacatatcttgccaaaaaggaaaatataaaccttggacagtaaaaaaaagaagcattagcatccataatgttgagataagaaagaaacacggtgaggatgaggcaaaattttaatataggaagagaacagtagaatcagacccgatataggtgtggcctttatgacgagggctgagagaggttagcagatagcaagcgaagaacccttttcccggcttgcccttattttcatttccaggttctcttatttgttcctgattttctccttcaagatcccggcatttgaagtcttctgttcgtgacttcttctgcttgaaataggcattgagggatttcgagtctcctttttcgctcctttttctcgcttcattgccacctggggcaattttcccccttctcatctctctcctattcactcacagcacagcaaatggacttgaatttgga

SEQ ID NO: 13185 - DNA, 671 bp, Gossypium hirsutum
aagggttggatcctacaaaaaagaaatccaaacttttcggttaaattcctcaaaggaaaatgatgtgagaattgggtcttaatattaatggataaacgtttggtttatggggtttcgagatataagaaaatgggagtgaagaaggtgaaatgcagggttttctagagaggtgaaagagagagagacgtgataaagcggcggagaatgaaaatgaagccattttttcgataaataaataggaatattttatgtttacctttggaaattttaagagatggcagtgaagcagtggctaggcagaagaaatcatggatatttggattattatcaacaccaatataaataatacacatatgtttatatttcacaaataatatttaagaatgaattattcggatgagtcttacttcattgttatcatattttgctctttttataatctagaaagattaatttatttatttttaatagagaaaataaaataaaatttgacttttaatattggtattttatggtacttttatcttttgtaatatttgctcaaaaggttattaaccctataactatcaaaagaataataataaaagggttaatatactatttgatacttatatttagttaaaatatttaatttagtatttgagtattttttgtcccaacttggtacgtgg

SEQ ID NO: 13186 - DNA, 294 bp, Gossypium hirsutum
ttgtacgcaagtgatgattaaatctttttctagttaagtaatttttcaattcaatctcgattctaaacttctctttcagcttgtgaccacaccccttaaccaagcctcgttacaaccctttaaagaccttttgattgatgtaccacctcaattcatagtggtggagatttgattttcatgcaagcctatggtaataacttttcatattgactgatgagtgctaatttcattgtccttaaacacttcgagtgatttgagtgaatctttagtgaggatttaaactctgtgagattt

SEQ ID NO: 13187 - DNA, 501 bp, Gossypium hirsutum
aacaaggcaaagaattattacctgtttcacgaaattaaaggtttgttaaggctttcttctaactccttggtacatggtaataacaagttctttctgatttctgtgaagccatcccacaagattgttaaggatattattattcgctctaatatttgtgcactgctagtagaaaggaaaatttctcattaaattgagtgagacttggaataaaaagttaaaccttaagaagaagaccaccacatattttctattctgctaataaatcaactttctattttaattttgtatgtatttcgtatctacaaaaatgtctatttcttcttatgatagcacatggaatggttttatgtttagaattatgatgttgaatcatagtctatgtcctagatagcaaaaggaattcatccttaacatttgggtaatgccatcttattggctagaaatgggtgattttagtattcaagcttatgaacttgtgcgacaagcttatgaacttgtgcg

SEQ ID NO: 13188 - DNA, 340 bp, Gossypium hirsutum
cacttacttcaacaagcatgacatttttcatttaccacataatatattttcagcaaaataattcaatatcacattagactattaactttcaattattattaacttcattagcactataaaaacaaaagcccctaccaattataaaaaaaaattgagttcgctaaggacaaatggtttttatttattttcaaggacaaacggggtacatcaaagtttactcatgccaatgagtaaggtttactcataactgccaaaaaaaaaaaacttgtttgaccattcccaaaaagggaaagggtttaaaaaacaagcccaaattggatcttcatgcaacccccgggaa

SEQ ID NO: 13189 - DNA, 615 bp, Gossypium hirsutum
caacttagtggtggaactaatacaaatttatcttatttttgtggcatctttatctgcaccatagactttgaagcctacatgttaaaacccattttactagggaacataatggaacaagtgtttatggagcttgtatagctgcttgaatggtcactgcacataatttgttgcagcacaagtgtttcgataaaagtaccgtggaggcgttgtactaagagttgccttttttactcaaaaaatgaaaattagacaatgttgctttgaacttggttgaaaccggtagagatcaacctctagggttaaagtacctttaaatatatgaaaagtatttcgcagaaactgttatatcctttttcccttcttatttcatggtggatattgtcctctttgtttgcatatgttaaggtgagatttccagtcacatgtaatgccattccaagataatttggtcggtaaatcatcgatgaacatgtccaaatgtctcggtgaactttacaggatcatttttgttgccattatgtattgggtgctagcttcttctaccttagtgaacttttatagttttaggtatcaattaatgtcaagaccttagtcttatatgtatttgctgcttcg

SEQ ID NO: 13190 - DNA, 605 bp, Gossypium hirsutum
tcttgagggaggcaagaggtgtttatgggccgggctgggctgggtcgggtttgagtcgggctcaactaaaaaattatgcttatttattgggctcgggtcaggccagactcaaaaaatgggcttaaaattttgcctaagcccactcggataaaaatattaaaactcgagcccggcccggcccgacctgcctgtatttattttttatattattttatattatttttaaatatatataatacatcaaaaatactaaaaatatcgaaataaatatttcccaaaaaattgaaaataaattttgaaaaatatgtagacttaaataacactaagataaatgcaacttaacaagcaaatagttctaaaataataaaaaattaacaaatacctttaaaataataagaaaattaacaataaaataaattttatacaatatccaaacaataacaacaaaataatagcaacataatagtaaaatggtagcaaaatatggagaaaacaacaagaaaataacattcaaaaataaaaaaaatatgtagattttttttgtcctttattgaattcgggctgggccgggctaggccgggcttggactaaaaaataccttaccc

SEQ ID NO: 13191 - DNA, 665 bp, Gossypium hirsutum
catgaaattgcacatttaaattgatagaaaaatttaatttgagcatttacatgtatatatatcttgtttttaaatgttccgattattgaattaccactgtgttttataaaaatgattgaaagcaaaatcttaaaaacaatttcataaaaattataaaattaaaaaaaaagttttttcttaagaatttgagaggattatagatgatataaaattgggtagagtatttatagaacttccactcaataaagaggttggttcagacaacaaaaaaataaattctctagtaaaaattcaaaatcttgaactcgataaccacaagtgtcgaggtagtgttgactacacttcctcgaactttcgtcatggcatgcatggcatggacttttttgatgatttgacataaccttgaactgtacaacctcatgcatcaagtattctccaaaaaaaaatatttttcgagaaataaattttggaaacacttaattaattaaataatattaaaataggttatatttaagtcaaaatatgatctcccatgaataattattaaaaaaggttaaattcttgtactaatccatatactttataaaagttgtgaatttagtctctgtacttaaatttaatcatttttaatccatgtacttttcaaattttaaaatttcaatcct

SEQ ID NO: 13192 - DNA, 736 bp, Gossypium hirsutum
tatttatacctgctttgacatggagcttgaaaccatgtaactaaactactctatatccctttacttttggaccaggagcaagcaatttaattttatctatatatgctctttgcatttccttgttgattcctaggttcaagctagataaattttagaatgtcaaagaaataacttatataataattatccgcatcttaattttattttacttatttgactacgaaggcattcatgatgaaaattttcatcttgaattcttgtataatcatatgacaaaaactatttaggatgagagcaattacatgtccttattaagatgagttggtacaatataaaacaaaggaggaggattcggtggtgctatggaggctggttcacctataaaggtcgatagttggaacaagaacaagagaataggttggttgagagggcaaatgttcagagtaaccttaagatggtcaaaggtatgaggtaggcaagccgaaatagactccttattatcttggaagtgtgttcacattatgatagagttctcctttaagcctgagtggtattcttcatttgaagtgggataggtgactatagagtcaaccatgcctcttatgttgaagcattatgatagtgttcacattatgatagtgttctcctttaagcctgagtgataggctccgtttgaagtgggataggtggctaggctgaaaatgtcaatatagagtcaaccatgcctcttatgttg

SEQ ID NO: 13193 - DNA, 655 bp, Gossypium hirsutum
ctgaacagtaaaccaactatggcaaaaccaaaaaggaaaaggccaacccaaatttccaaacctgtttccaagaccaattgaattaatgaagttccctgatgtatgatatcaaaatggaacctttaaagattcaagaaccctgcaaaaagaaacaagaaatgaatcagagaaacaaagtaaaacagaaatatgggaaagatgagttagttaagatactttacaatgaaatttcaggggttaaaaaagttaaaaacctccgaaacagtataaaggataacttcgattctgcaacaatacaaagaaaaagaattgtgttgcacgaaagaaagagataagtgagttgggtttttggggattagaaacttgagatcaaaatcaaaggagaataaaagaaaatgtttttccgggaaaaggagaatgaaatcaaagcagttattaataatatatatatatatagtttaaaagcttttgtttgattatagtattgtaattaaaataaagaagaaatgaaagcagagggatttcttgacggagacgctttgtttgtaattttacacgcatttcagtagcggaggcatttcttgggatcttagttatagttttctctttaggataattttgccattccaagaggatattacgcacatcacgttca

SEQ ID NO: 13194 - DNA, 609 bp, Gossypium hirsutum
  misc_feature (560)..(560): n is a, c, g, or t
tccccgatagtcggtgctttccatttctttaatttttcttccaaccatctacacctttcttcaagctctctcgggagttctacccttgtcttttctgcttctgttacttcatcaagattgaggaccacagggttggttgggttgtcccccggattagagcccgagccggcctgataattcatcggtgccgaaacaccggcctgaaatggttggggcctaattgtgaccgatggccttcttgggtacatgtcaggttgtgtctgaacgtccgctggggcaaaacccggagggtaggtaggatcttcattatcttctcccgcattgatcaaagggcttttccctttttctaatcctccagccaatagacgagttaattggtccatcatgcttttctgggactccaacatatggtccctcatatcttgctggattttggcaagctgttcttgcatacgtgtttgtaattgatcctgcatctctttttgcatttgttccaatctctctaacctttgatccattgctcttgtttttcctcttgtaccgtaacgatgttccagggnaactgccatgatttttagggttttttgtgagttttagtgcgtgagatgc

SEQ ID NO: 13195 - DNA, 688 bp, Gossypium hirsutum
gtcaaggtagttatataatatatcatatagagaatgtagcttatgcattgtggaaagaaagtgatgaagttactaacagaaatagagggccagcagaactacaccacatgagcatcgcagtctagtcaagcatgggcctatgtgattggaacaatggcaaagccttggtaattttctctaggaggtgattggttcgaatcaagtagggaacttttcaagacatcatgatttgagtataaaataatagaggaggctttcttgtggacaaccaccttgaaatggtaagcttggaattcaatggctattatatgagtagggcagagatactataaaaatccatatagttatttggttatagatagttttggctactaaaatatatattgaagttacaactaactacatcaacaattctgtgaaaaacaggatattttctattatattttccacaagagattacatacatatttatacacatagttagcctaactaaggtaactttacgctaggaaacagaataattgtagggatactgtacagccttaaagttagggatagaatatttttagaatcatatttgatatactcaaatattttgatatctgacactccctctcaagctgggaagtggatatcatccattctcagcttgcttactaatttctgaaacaacttcccagacaatact

SEQ ID NO: 13196 - DNA, 636 bp, Gossypium hirsutum
cactagaaatggaagaaacattttcaatatgtaaaagagaagagttggttatgtaaaaaaaataggagaaagtgaacttagagttaaattctcaatttatagtaaatgaggttaaaaaaaggagcataatcacagatagaagttgaagcccattttgagtaagttagatctcttagagcggcaaattcattcatttaagattttgccagttaaacgaggagctaaacaagcagcagtctgggtttctacccatgctatacaagagatgttttgtaaaggttggctcaaggcaaccaccatttctttggttctcattttagataaggataacctaccagatctttcatgtttttgataatttttgaactttgagcaagttcctcccaattggatattgaatctacaacatgcgaatctaaccacatgaacgcgtcatcacataatgaaaaggggaagagccaaagacgaatagcttcaacagatacatcattatatctaaaagtatcacacagagttaataatcacttgaaatgcaagttcaggttttcattgaccgatcttcaaaactgtaaatcactttgaattatcaagaccatggcctattttatttcaaaattattggcattgattgtcgac

SEQ ID NO: 13197 - DNA, 339 bp, Gossypium hirsutum
  misc_feature (21)..(21): n is a, c, g, or t
  misc_feature (50)..(50): n is a, c, g, or t
  misc_feature (53)..(54): n is a, c, g, or t
ttcttagccagatcccatttnactaatctgagcgactgatctagtctggntcnnacaacactagtatagatagactattatgatattctttatcgatgattattatgtttaaatttatggttcaatctgtatattttgaattgatttgatctaatctatctaatattatattgccattagtcctttaataatttcaatagttaaagctattttgattaactaataacatcataaaatatattaattatattaaaaattaaagcataaaaattaattcttaaatttatgtatagtaaatgaaccaaaactgaagtttaacatttttaagtaaaaaaaaaa

SEQ ID NO: 13198 - DNA, 592 bp, Gossypium hirsutum
  misc_feature (42)..(42): n is a, c, g, or t
caatcagtttcatccctccttgtccgaatagttctgctccantctgccaataccttgcattcttccaaggagtttgtagcctgttttcatagtgtaaattccattgatcgtcttttgccgattatgagtggagatcggtagcctaaatgtcgcattggcgttgtcatcactaagtcacgattccaaccactcctggatcgatgcataagatcgctcaccttgaggtttggtcacgagaaattatgagaggtttggacaaaaccagtaaccaaaccaaccagccatttatcttcccaaacatgaactctatctccattgccgattctccaaatcaatccttcctcctcgaagcaaagatactttcaaatttataactgtaattaatcattactaataatacataagattgatacttcaataaccaactattggatttagcaatacaattatacttaccatatataaaaattttcaaatcaatatgatatttttatcatattaatacagaaattaaatattttcaatatatatttcaccatcagatttatttttttaaatataattttaatttactcagaacatgaaagaacac

SEQ ID NO: 13199 - DNA, 501 bp, Gossypium hirsutum
  misc_feature (437)..(442): n is a, c, g, or t
  misc_feature (444)..(446): n is a, c, g, or t
  misc_feature (449)..(453): n is a, c, g, or t
  misc_feature (457)..(458): n is a, c, g, or t
  misc_feature (464)..(465): n is a, c, g, or t
  misc_feature (472)..(474): n is a, c, g, or t
  misc_feature (481)..(492): n is a, c, g, or t
  misc_feature (494)..(494): n is a, c, g, or t
gtagagaaaggaaataagggtgttataaacttggtaatcaacattttgcacaaaaaaagttttggacagcagcagtggtctaactttgaaaaatcaccaaaaattgtacaaatcaaattagaggttgaataaaatacgaaactaaattttattgagtctattttctcatagaataaatgatgtaagcaatataattgtaaattatgagttataatatattttaggagacaaggtcagaatgattttgggttcctctgttctgactttcaaaaatcatcaaatattttaaagaaataattaggggtataaatttatatttttaaattcttaatgagtttattttaagtagaaaccaatggaaacatcatctaaaccccgtattaaaagataattaatttttagtgaggaaaggtcgaagctgtcaaacagaagaaaannnnnngnnnacnnnnnggannactttnnccgaggnnnagctcannnnnnnnnnnnanatgactg

SEQ ID NO: 13200 - DNA, 643 bp, Gossypium hirsutum
ctgacactctcgtgatttttagaagctaggggttttgttgaggctgcgcttccttaagcccacgtgctttcatatgtttttgtttcgtcttgatccctttgtattgttgcctattttgtttatgttcataggttcttctttgacctaaacaataatatagtaatatcatgtcttttcttttgaaaaataataggtgttttcgacccaaaacagcacatgatttttgtcttttcttactttacaccatacctttaattatggctaaaattgtagtggagatagatgtcatgtcccaatacatgcatctaaagggatgtactagtaaaattttatggggagttaaaactggacaagaacatgtcacaataaacttaactacagccattttatatctttattatccaactatgcattgccaaatattccaaaatattacttcatcaatcatcacattgcatgagatctaattaaggtccatactgagtaaaacattcagtcatcgtggtccatgcagagtacgaggaagggccatgttcatcactatcagcttgcgccatgtttgttccataatcatggtgttgcaggggcaatggcacggtaatgttattattttgagcaacgtatgaggaaagggcttgttctt

SEQ ID NO: 13201 - DNA, 1110 bp, Gossypium hirsutum
  misc_feature (440)..(440): n is a, c, g, or t
  misc_feature (444)..(444): n is a, c, g, or t
  misc_feature (465)..(465): n is a, c, g, or t
  misc_feature (477)..(477): n is a, c, g, or t
  misc_feature (516)..(517): n is a, c, g, or t
  misc_feature (554)..(567): n is a, c, g, or t
  misc_feature (569)..(579): n is a, c, g, or t
  misc_feature (623)..(630): n is a, c, g, or t
  misc_feature (1022)..(1022): n is a, c, g, or t
  misc_feature (1040)..(1040): n is a, c, g, or t
  misc_feature (1076)..(1076): n is a, c, g, or t
atagagtggaagagtgtgtaattaccataagaatgagagcattttcactgatcccttcatctttcaccccttcaattgcttctttagcattaacaacttccctttcttcctttcttgtttgattaatcgcagtctctagtgaagtcttatcatcgttttcgctgcctgcaatagtttccctcttctcgttcactcctttttcttctatttacaatataggtggctacaagaacattttttttctcatgaaggggggagtactaggtggtgggataattatattattaataatattcgaaagctgttgtagtagataatcccccttatgaaactcgtcgtataatgaagaaaaaatcaatattgtgggatcaggtggagaaattattattatttttcttgttgctggatgacttattatgatgctcaagatggtcgttggnagcntctccgatggtagcatagtantttccgccttanattaaaataaaaagtggagtattaacaccacctctgttnngagtgctaaatgatgaccacttgtggagcatgttgtnnnnnnnnnnnnnntnnnnnnnnnnnaggaggtactgttaatgcacaaatttttatctaaatttaaggcnnnnnnnncgatacaagcatgggagatgcacgcaaggaccattttgagcatcataaggcttcatgcagcaagagaaatgctaagaatctgtccaccagatcccacaaaattcttgatttttgccttatacgacgagttacctaagggggactatgtactcgaacagcttgccgagagtctaaataaggtaaatatcccacaaccgtgtagtgcacactccatactgagaaaaatgaacttctcggagccaactatatcggaaaaagaaaaaagagggaagaacaagaagaaggaaactattggcagcaaagaaaacgatgataagacttcactaaatgctgctattaatcaaacgaaagaagaaaagagggaagttgttgatgctaaagaagctattgangggatgaaagatgaaagnatcaaagatgatgctctccttcttatggtaattacnccctctttctcctctgatgcccatcattcttctt

SEQ ID NO: 13202 - DNA, 467 bp, Gossypium hirsutum
gggtgataaagcatgtgcctataaaaagtaatcaagtcactaatcttatagctaaaatgtcttctgattgaaaagagggtatgcacgtagttgaagataagccttccgatgcttttgctcgttttaatttaatatagttatctcgtgtcattattcaccaaaaaaattagagaaggatgaaaattggaatatttatagataaatacgtataaactaaattatcttatgattttttacataattattaatttgtatgcactaaattattgattcataaatacgtagttgaaaatatttatgacactttcacaatatggatgaaaacatttgtatggcaataacataaaaaaaaatgatataaagctaaacatgactttagttgaaatagcaaaattgaaaccataagtgcatgttgtattaggttcaaatttgtatgtatttattttttagactccattggtcaacaa

SEQ ID NO: 13203 - DNA, 447 bp, Gossypium hirsutum
aaaaaaaaaaaaaaaaaacgtgacattttgctatgacggaatattttactactcttaattagctaacataccttaattccagaacaatacgaatatattagcaatttttactgaagaccacaaactaaaccatgcctattgtaacagtcaataagcaaaaacaacaaaaacaaaacagacctttcgaggaacttcgaatatgaaaatttcgttccactttgcaatgcctttattttggtactccatgtctgaaactaagggcttcacacatcttgtcctcgcactctgagggaaaagtttttgctgatctgttgcttgaccatcaacgacaaggcgcaaaacacaaaagaagttatggctattaccatcattgattaaaggtaaaccctgccaaatataccgggtcatatttctgtttacaagtaattaggcttcaaagaaaaaaaa

SEQ ID NO: 13204 - DNA, 650 bp, Gossypium hirsutum
ctgtttcgtcccttcatttaggatttatgaatggaaccccgtactagatggatagagatcctgcaattgcacatcatatgtgatcatattagaatccatatccttgccattataattgtatgatagagttttgtgttaatgttattgcagctcttagtgacctttttgctcattacatggaagcatggaactcttggtatgccgaagttgcaagaaaagaagagattcattgaagtccctaatcgcccttctctatttgattctctaactcaagatgaccaaatacacatgttcaaaaatggtacgcaacatttgtttctgacactgttggatgtatttctcgatccaacaaccctctcaagtaatcatataacctgtcttttcgtgcctttcataatttcctctttgagcttcccatttttcctctcgtttttagaaacttagaacattcaataagtttccgaagtactcactgattaaagaaaaaagaaaaaagaaatcattgtgaattttagatgggttatctttttgggtgtgaactagatttccaagttcctaactaattgcactgcttagtgtcctccattttgcttttgtttttatacgaccctcgagtatgagtattggaatgcgtgagtacatgttgaatg

SEQ ID NO: 13205 - DNA, 587 bp, Gossypium hirsutum
agaccagaatggctgttgcatttatacagtgtccatagttaaacataacaaagtattcaaccagaagcaacaaacaaccagtgtcaagctcttgaggctaatcaagacaacacattgcaagaaatggaattatgaagccaccattcctcacagtttctcttgttcagttccttgattagttgcaggacctgcatggtattggatcttccagtacaacagattctcctaatcctgtcttgctagatgtgatacatggaggctgcccatgctattgcctttgagcttgaattcagcccttttttatcattcagctacctttctctgcagtccacagagatgtaatatttgctgccactcttcttaggaatatctgcaacgaaagaagagatggttccttgtttccatctcctgcttgcacaggcaacaattctgttcaacagatattccctcgttggtacattagtccttagcaggcaacttaatagccatccaagcatgacctaactagaccgggggacaattattatacccctaactaagtaggccaaggctcagtgcaagatcaggtccaagagagcctgaataat

SEQ ID NO: 13206 - DNA, 549 bp, Gossypium hirsutum
  misc_feature (46)..(49): n is a, c, g, or t
aaccttttgccctccatttttaactgactcggcactgaaacatttnnnntaccagccagccccaaccccttgcatcgagtccatctctatctctaatttcccaaccctctgccccatcactttctccatcataaaacctaatcaatcccttttccatcctcagttattcaattcatttccaaaacctcatctttgctctgtttcaaagatttaattctctgttttcattttttgtcttttctaatggctcgagaagcttatttggttcctgtcctggaggcacaagtagccacgctgaagaagaaaacggcggtgacaacgagctggatttcgatagacgctaaggggaaaagcgtgattcttgacgtcgacaagtatgctataatgcgccgcgttcaggttcatgctagagaccttcgtattcttgatcccatgctatcttatccttccaccattttaggcagagagaaagtcattgttctcaatttagaggtattttttatttatgtttttccaattttttagtattttcttgagatgtgtgctaag

SEQ ID NO: 13207 - DNA, 671 bp, Gossypium hirsutum
tagtcttctcctttgttgtctaccaataatatcataatgtgccaaataagaatctgacatgttagatgcataatagcaagaattgtgaatgagttatatattctcatagctagatcattgccacgttacaaggcggttgcaacatattttggatttattctcaaatttgccaaaaagaaaggacattttatgaatctatttaaaagttacccattcattgctgtagagacatggttttcctgaataataatcattttgcctttatttttcatgtttatctatgtatcgcttatatggtatttgagccagtttggatcatgactgccatccccctcccttgttcatcatgactgatattattgatgaatatactcactttcctcagttttttagcgataaaaatgaatctttcttctccaccaaccatgttaatttcaaattggatgaaaaaaattatcttctctggaaacaacatgttctattttccattcatggccatagcttggagcatttccttgacatctcaaccttcccaccctcaaaatttattatcattgagtttggcaaatttgtcccaaatgaagcttatactctctttgttaaacaagactgtgcacttgcctcatggcttttgtccacgatgagccccaatatcttgtctcaacttgttg

SEQ ID NO: 13208 - DNA, 686 bp, Gossypium hirsutum
cattacctgatagggaaacccaactcatgggggttaaggaataaacattattgtaaaaaggtaaaactcagtgagacccacaaaattccttggaaacttatatacgtgttttaggttgcaagtatgtgagtggaacctatatgccaagagggaccaagccaagattgtgtcaggatagctgatgggcgtcggaactacaaaatataaatctcctacgctctaattgatttaaacagttgtataaaaaagtagggtcaatcccatagggactggggctcctaattttcgtgttacgtaaccagattcttgagtctaggcagctatcgtgcccacgacttgtacgtgcaaagctgaaaaaaataaataaaaagggattttatatgataaaggaaaataaaaataaaaataaaaatgaatagaacataataataaaaaaatgataattgcaaaataaaattaaataatttgaattaaattggtaaatcaaatatgtgaatgcttagccttagcctcgatacacttgaaaattgaattggtttttgaaagtggatttttccttccaaaagataagttggttatagcgatcaaggacgcctcaactgctaactcttccttgtgtagttggttccggtacgacctgtaaaccaaaccttaccggttatctaaccacgtaacacatgtttgca

SEQ ID NO: 13209 - DNA, 678 bp, Gossypium hirsutum
ctaacccttcctcatgcgtaaccgactcccgggcctattttctcaaatctcgcagatctaaatttattttttaatggtgaaccgatcacaccttaataaaagatcagtggcgactcccatttttatttttaataagtcgataactaaatttttttgattttgaaaaaatggtgtcgacaattaacattaaaatataataataaaaataataaattacttacaatgagtgagattttgatagatcatataaaagttgcatgaaaattgaaaattgaaaaaaataataatggagataaatatttttcaatgcttcatatagacgggaaaagaaatccttcattcatgtgatttatgagggatgttagtatcctcctaggttgaattagtgaaacagatgagacaatggatgtagtatcgcccgctctccctaatctcctcccttccaacaagttttccctcaaaaccgaacgccagattcaattgcccccacgatttctaaaacaatgccccaaaactcccaccgccaaacccatttccagcaaccctggtactggcactacctccgatatcttgcgcttaatggatagcctttccgttcccatcccccctgatatctacgcctcccttatcaaagaatgcaccctctcccgccattccgttagggctctccagttacat

SEQ ID NO: 13210 - DNA, 635 bp, Gossypium hirsutum
  misc_feature (59)..(64): n is a, c, g, or t
tgaaaagttagactaaacccacatatggtgggacttgaacctagaacctaaaagttccnnnnnntcctccttgccactgaaacaaggtttcattgcgaatattgaatatgctcatgaagttcaaatgatggttctaataatcttttgcttctttgctggtcaacttttttgcatacctagttctatgtgatttaaatttttgtatgacttacatattatatatatatgtttatacttaatggtttcttttgtatggattcttcactttttcaatgtaacaactccttgccactgaaacaaggtctattgcaaatattgaatatgctcgtggtgttcaaatgatggttccttatctattgcttctttgctagtctgtcattttgtgcatgcctagttccatgtgctttaaatttttgcatgacttacatatatcgtatatatatgtttaaactcaacggtttcttttggatggattcttcaccttttcagtttaacaaattaacaaattaacatacctagttctatctgctttaaactttatatttccatttctacctgcacttcccactaacaaccttttattgattgctgcttaaggctatgattttctcatttagactcccaataaatgcagc

SEQ ID NO: 13211 - DNA, 658 bp, Gossypium hirsutum
tatggaattagtgcttgacggttgctcaaaattgatttctgttgcaaggagcaatttaccttcgaatctgaaagtgctagtcattcgaagttgtaaaaatttgcaatgtttgttgttggatgaaggagaggatgttgactccaacaatgcatgtgttcttcaggagttgaatattttctattgtgaatctctaaagagaataaatagaagtgtgttgccctccacactgaaagaacttctaatattagggtgtccaaagctagagtccatatcccaagaaattcaagataactcttctcttgaatctattcgtatctttagttgtgatatgcttaagggtttaccacaaggattgaacaagctcaagctttgcaagatcatgtccaaagttggttgttcaaatttgatttccttagcagagagtggtttgcccaccccaaaccttgaatgtctccgccttcacttttgtagtcgtctccaacctttgcctgggaatatgcgcagtctcaacgctctaaaagatttagcaataacggattgtccaaatgtgacatccattctggaagaggggattcctacccatctcacatcgcttataattggtggacccaatatctggaaggcaatacttgatagggatttgcatacactcacttgt

SEQ ID NO: 13212 - DNA, 688 bp, Gossypium hirsutum
  misc_feature (683)..(683): n is a, c, g, or t
agaagccctttgcagtccttacagagactcgacttgaaattccccatctcgtccatgaaaccggagaaaatctctgcacgtataacaaattttatatgtttataattgttatatttttacaacagcttattttatacaaaatatctgcacttcttaccttgagttacattataaccatgctgccttaggagcctaaattcaagtgctgtagcatataagtttccttccttccataaagccttgctctgatcagcccgtaaatgaatatcctccaaaatcctcttggtttcattcttaaaatgataagataaaccgagcctctgcaaggaatcgatcagctcaagtttctctaaggggtccataacattctcaagcatcattctcacttctcccactagtctgattgcttgttcattaaatgattccccctgcatgggtagtaaatatattctcagcttgcataaaaaattgcataatatataatctttgtaactttaaagtaatttccatgctaatgtaaataatatatatatatatatatgtaccagatagtcgcttttgagcgactgaataaaatcgtactcccaaatgggaggatggtacttagcagaccgtctaacaattttttttatccgaaacattggccgtagcaacagctttggaggctccaacaacactcaagntagtg

SEQ ID NO: 13213 - DNA, 745 bp, Gossypium hirsutum
  misc_feature (581)..(582): n is a, c, g, or t
  misc_feature (592)..(695): n is a, c, g, or t
  misc_feature (699)..(707): n is a, c, g, or t
  misc_feature (710)..(742): n is a, c, g, or t
cctatgccttgcttgttggtaaccatgccctcttcagtgatgttcaaagctgaacatactatgaggctcttgctaaggggaccagacatctccaactactagtagtaaatttaacctgcataaaagtgaaaaaaagaagaaaaaaaggaaacaacaatgagcctagccctagacacaagtgcttccaaatgcacatagattaaggaagagaagaaatgattaattaccttgaagagaaaagcaacaacagccagtagaggtctgcaaagagaccactgggggggggttgctttgctgtgagtgaagaagatgaagtgtctgaagtgaagatgccttatgggaaggtaaaatgggttgatgatggaatatgggaagaagagggtgttaaggggggctatttgtagtaggagggccaaaagtccctttggaatcaaagtcccaatggggggaccctcctacgccaccatgaaaacactcctccattggttttccttatcacaaaacttgctcattaaaataaaaacaacacatacttggattttttattttttatttacttttacatcatagttggacagganntgaaatggannnnnnnnnnnnnnnnnnnnnnnnnnnnnnnnnnnnnnnnnnnnnnnnnnnnnnnnnnnnnnnnnnnnnnnnnnnnnnnnnnnnnnnnnnnnnnnnnnnnnnnncccnnnnnnnnnccnnnnnnnnnnnnnnnnnnnnnnnnnnnnnnnnnccc

SEQ ID NO: 13214 - DNA, 576 bp, Gossypium hirsutum
  misc_feature (567)..(567): n is a, c, g, or t
ttaaagaaaatgtcaagacagtgcaccacccctttgcagacacgttataatgtttcgtatataatccacaggaaaatacctagacaaacaatgaggaaatggaacgcattgtcctcaattgcatataaacaatgtgttttttaaaaaaaaaaaatcattttgtaatgcctatttctttctccaaccctcttcattttaattcatccttcaattcaattatcatagaaagctcaaacacaaaagaaacttcgaacttcaaattttgaactcccaacacatatttattgaaatatttgaagaacactttaaataaaaaaaatcaagtacacttaatgatctgcctaattgtaatggcatattcagaagttattaatccagaatcaattttgaaattttatgttaagcaacctaatcaagttcctaatggctgatatttattgaaataaagaaaaagagagaaacataataccaaatcaacaaatcacatgcgaaactagggtttagaaatagaaggaaaaagggcaaaagaaattacgtcaaggaagattaggtgggcaacaacagtgnctccaacgt

SEQ ID NO: 13215 - DNA, 657 bp, Gossypium hirsutum
gcttcattcttccagttaattcgctgcaaggaagctttggtgacaaacaaaattgctgatcgactggtgaaccataaattgtctttcgcttgctcaatgttgcatctacattcatatgtccaccttcaagattccgttcatttgaatacgggttcaagggggcatctctgttgctccggggtaaggaagataaactttcatcaattgggggtgtcagataactgatcttgttccactctagaaaggtggaatcggtgttttcaatttccttgtgcctactgtttccagcactcaggcaaggagttgagagagggcccagccgcagtgataggtcacagggaatttcatgtgggttgttagaagtatttctaacatctgtttggttcatcttatttgaggagtccacatcaggagagaagagactatgaatgacacccatcatggcaggctctattgtgttagaaaatgactttggtgagattccataaccatgccgctgttcttcaactttaaggtggtttccatagaaaagaggataaactgaataggtatttggaggatgcttctctacattactagcaagaggactattgtttgatgcaaaaggaaacttgtcagtgccacggttactgttctgagcaatgtgtttctgaactt

SEQ ID NO: 13216 - DNA, 641 bp, Gossypium hirsutum
ctggtgaagtggttttgttcttgggttgtttcttatgccttcaactttctacttcagtggagctctaaaatttaataccaccaactatgttaattgggacttttctttcacttgaagtacgctccaaacatgatccgacactcatccgaatccgaataatgtagaacactaataatatataacaataacttaatcacgattatgacaaatatgaatttcttccgcaggagttatcattctaaaaccatttatcattacactattacaggaatattcttcatattttcaagcatttctggggtagcgatcatattcatcgcaaagctggtggcagagaccaaggggcgaacgctagaagaaattcaagcatccattagtcgacatttagaataaactgacaaatataatcatgtcgggatattgatttccatagattcagagacttgtttcaatattgatcaccttatgctttgttcttgaccttatttcagcttcaatttaccagaatgtttctttttttggtatttttcatgaatctgcaaaaattaagatatgtggttcatttaaaacttgaaataaaagccaattagttcttaacaaatcttatttaacttttgagccatcataactgtgcttatagg

SEQ ID NO: 13217 - DNA, 650 bp, Gossypium hirsutum
aaacaaccctcatcaaacacaacatgtctggacacaaacactctattattttcagcaaggcacttgtaccccttgtgaaccatactgtagccaagaaagacacaaggctgagaccgaaactggaacttgtgagcctgaaacggtctaagatacggataacgtctacaaccaaaaacctttaaatactgataattgggaatagttttatgaagaacctcatgaggagacttgccgtggagcaccggtgttggaagtctattaatgagataaaccgcactagtaaaagcatgagtccagaagcttataggcagacttgcttgagccaataaagtcaagccagtaccgaccacatgacgatgcttcatttcgaccaacccattctgttcggaagtgtgaggacaggaaattcgatgttgtatcccaagtgaagtcaatagcttttgaaatggacgatactctccgccccagtctgtttggagagctcgtatcttacacccaaactgcacttcaactagtttctgaaattggagaaacttgttcacagcttcagacttgcttttaatcaaatacaaccacgtatgtcgtgagtaggcatccacaaatgaaatgtaataaaggaaaccatcagaaatcataggagcaggtcccta

SEQ ID NO: 13218 - DNA, 565 bp, Gossypium hirsutum
gtttaacaactaactctggtaagctttttatctttattttgtctttaataagctttttttaattaagaaaccgttttgttctttttaaatgtaaaacttttatagtaaggagcaacataactaaatcaccatatgctgatattgaaaagatttattgttcctattcccttggctccaatttttttggttcaaaacttaatgtctaagtgcatgcttgagtatttggaaatcaatcctgtgaaatagtttctagttaaggtggcatagaagcatataggccaggcataatctgttcttacaatttatgattgttttttggtttctcctctccacaaactgtctaatgtatttggcagaatgagatgatattatttatgcctatacatgcatttctctctgtggatgggtaacctatatctttgatttgaggcatagtatgatgacagcataacttattgctgaagttatacagccacgttgtttgcatgctgatgaccaattttgacatttaagatttcagaattgagatggatttccaattcacgctttcttaaccttgtgtcaa

SEQ ID NO: 13219 - DNA, 595 bp, Gossypium hirsutum
agagtgaaataaggtgcaagacgtatatgtgtgtgtaataagcttaagatatataattatgataatagactccaaaagtgtggcctggtttatctaggaaacatgcaatttctttgttcgccaatttgtagctgtttaatatttaaatattggtagaggatttgatactatcctcttactggtaaaggtacatctaatggagaagctgaaaataatataaattaatgaaaacttcaatcaagtgaatgttagtgtgcccgttaccttgcccaaaagtgcttctaggcacattagaagtgtgcttgataaaatgcgcattgcccaaagtttttctttcttctaaattcttattagtctataaccattaactccctcttttcccaaaaaaagtatcaaaacgtattgaatattcaactttcaacattgtacaaaccatttattagtgccaatttcatattaaaaacttcattttctaaaattctgtacttatttttcaaagtttaaacatcgtgtcaatataaagaacagaaactatacttaatgaacctcaatggaaacattacaaaacaattttctgcttaactccgagtaacac

SEQ ID NO: 13220 - DNA, 648 bp, Gossypium hirsutum
atttcactttgctcgaatttgcaaaatgaatcaaatattagaggctaaggatatttagtggaataaattcttcgggatattatgttggaaggaatgagtgtattttcaatgattagcatttaaatttggaataatgtaatatttgatgttttataaaatgtttaatatggtatctgtattttaaaaatgtttattgtggtacttgaattatcaatttatgtattatttgatacatgtattttcataaaatgtttaatgtgatacttatactttaaaaatatttaatgtgatatctgaactttcaatatttgtattattatggtacttgatttattgagcttgaatgggaggttgaataatttgatttcaactaccattttttgttttatcttttcacataatatttatattattcatgtggaattgatgatttgaaaaaaaaaattctgtcgaattttcataggtcataataaaacacaagtttataattcaagtaccacgcattaaatattttcaaagtattatattaaacattttataaaaatgcaaatgccaactaatgcataatttgatagtttaagtatcatattaaatatttttaaagtacagataccatgttgagagtccgagaaccaacttccctctaaa

SEQ ID NO: 13221 - DNA, 684 bp, Gossypium hirsutum
attcatccttatattagtatgtctataaatggagcaagctgataatgaaagcagcttttacccatttctcacttactggattccattctcctgtaacaggatctggacggtcccggccgccacttggtgcaatccatactaatttcgagccagtcctataatgatacgaagtttttggtcttaggctacatatttgttgtaaaaatcagagcgtagattcaaggatgttaatattacaatggcattaaggtaccttagcagcaaagccatctcttttaaacttcgtatgttggcttttcttttcatatcagcaagctcaggaacatcatacatgtgctttttggagtacacgcatataaggtttctaaaatgaatttggtacaactttttcttttgttagtcgtcctttagcatatcttgacagaatcaagtgaaaactcagtaactatttgagtaccttcccatgctgaaaggcttgcaaagaggatctgttatgactctatcccctgcaacatagatctgcggcataaacagaaattatgattgaacacaacgataacgactactacggaatgctcggaatggaaattatgggggaatcaccaggttctcggcaatatgtggatttgttttctcaagcaacagcgcaatgacggctgggtcagcttcagtttgatggtttga

SEQ ID NO: 13222 - DNA, 651 bp, Gossypium hirsutum
catgtgaactttgttgccggaaccaagtgtaagaatcagtccttttcctttatgatttgtacatttttaagtattgaaatacacatgaaattagtgatttattttttatttttgcatctctagcaacctgagccaacaacccctgatctgtgcccccctgagtctcaaagacctacagtccactcattctgcaaggttttaactgcgtcagatacaagcactcatggaggattttctgttcttcgcaaacatgctactgattgccttcctaaactggtatgagtttctagatcgtgctatttgttttgccttcttcacttttttgttttaaatctctttttttctgatatctttacatggatgtctttaaggacatgaatgatgcaacaccaacccaggaattggttgcaaaggatcttcatggttatgagtggcgctttaagcatattttcagaggtaatatgaacacgtgatttttgttgtcgtccttgttcagtcatttgatattataagtgctcctgtggttctattagacgtgaaatacattaagcctcccttattcgttaggtacacattatttatatgtatctgattaaatgagcaggccaaccaaggagacatttgctcacaacaggatgggagtacattagt

SEQ ID NO: 13223 - DNA, 504 bp, Gossypium hirsutum
ctgctgaaacctttagagacagtatgatatgcattgacatccatgctttttcagattgtggcaagtttctggtgatgccattcacccttagttgaagtcaattattacataaatgatatccttttgcttgcatttatgtccatattttagcaactcttgttgagtgtaatgataatgagtccaaatcttatatttgggtaatagggagttctgataggaacatcggcttttgggaaaccgtatcacgtccgggagagaggttataaatattccatagctttatttgttttgaatgtagatgagagaaagttgaagcacttttaagttgtttttcttttggttgtggattgtagaactagtttcaacaaggtatggaagtgctggtatgccttggaagtactggtttgatgatctcctgaaagaagaacaatgaaattaagccttttggtaggagtgaatgagctacacggtattcatccatgagaaaggagctccaataattga

SEQ ID NO: 13224 - DNA, 534 bp, Gossypium hirsutum
aattctgaggtaatatgcccagtttcttggtcatgtttaaaactattgacatacatcctgcttgtaagcaatcttgcttgtgaatgtttgttgccactttcctgtaggttcttttaattgaaaattaaaaatttgggagttaaaaaggttcttgtaggcaattaagtcattttctagtcttatagcttcctattcctttttgtctctttatacttgttgcctattgtaggttgaggatttgtttttgaaattcaaaagcttgcacatgaaattcgagataacaccttcatccgcatcatatgagaagctcattacctattgctgtgatttacacaaggtatgacaagatttatttcaagcaaaaggagcaaaaagtccaaattttagaacttttagaaccatgcgtcatttaaattgttctagtgctattgccttacaaacacttttgatggtaaaatcttatgggatttatacttgggttttgtatggccataaccaaatattggggagcttgaagacgggctatgggattta

SEQ ID NO: 13225 - DNA, 633 bp, Gossypium hirsutum
ccatcttaaatcacgcaaaccatgtcgggttcacaacctagggcagaaagcgaaaggctaagggagggtatgggactaatggttaagggtattgcccctagtcatagcatggtcgaagagctgggtttcaagagggtatgtatggttagattagagggagggggactgcggatgtctcgtacttcttagcccttcttgaaggaaagaagtaggtctcggggaaaattgaattactggattaaattcccggtcttcacccaacctgcggtacctaagagcgccccgttcatttggttcaggcgaaaagcccctgaaagcagggagaaagccttcaactatcatgtcttaagcatcgactcaagatgagaaaaaggtcgccgccttattccgtcactaaagcaggtacagccatccagcctttctacttattcctgttatccggatccagctaaccaaccttccagtagaagaagagtccatagcatagggaggatactagagattcccatcacttccaaaggagaaaagccgcatgaatgaaggacgcaaagacttaagatcgaacaacaaaagctgtcgtcaatcgaagaatcttcattcacggatcggcaggaaagtaggattgaaagtgca

SEQ ID NO: 13226 - DNA, 410 bp, Gossypium hirsutum
  misc_feature (320)..(326): n is a, c, g, or t
  misc_feature (328)..(339): n is a, c, g, or t
tattctggccgtcgaatatttcaataaattaatgggaagaaaacgaattgccaccaactccatttccttccttactttttatatgcatgtttcaagattctttctcttcatctactttagtcatcacctaaacgatcagtatcttcggaatcttcttcaccaccggttatgacgtccctcgcttgtggctccaccctctccctcctccgcggtgctgatcccaacaacactgctggttctcctcttctctcctcctacttgctgcttggctgcacccaccaattattgatggctgcttcttcgtcgtcgtcgtcaaaaannnnnnnannnnnnnnnnnncgcgccgctgctgctcaggtggaggatgtggtggtggagaaaaaagaaaacaaacggctgttgataataga

SEQ ID NO: 13227 - DNA, 648 bp, Gossypium hirsutum
ccaataccaacatcaacatgtcgaaaaagagttgtgttttagttaagcttgaggcttcatcattcacttgctcattctccctcacaaccatgtcaattatgatcaactttcttcctaccttgtcttggcttgaaatggcctctttacatcgcttcaaaattgtcaagcatccttcatcattccaatcgtgcaataccttctgttcaattatcattcataattagctcaaaaaacataaaacattagctaacccacaaactatgattacatttgccttcaaatctttgaatattatcatgtgtaatggaatttgttgtgcattatttataaaagtaaaaataccagaaaaaaataatgctaataaatttagtaaagcttaacctttaataaaattgcgtctccggttggaaatgcctcaaacatgttgcctccaacatatttcaagttcttactcccttgcaagccagcaacaatattaggaagatcaaacacagtgcactccatgagtggaaatgtatcagcaatggccttggccgtagttcctgtgccacccccaacatctacaagggagtccaatccctcaaatgcccctttacacttgtcaactagaacactagtaaccaattgagaatcactagctaagccatc

SEQ ID NO: 13228 - DNA, 681 bp, Gossypium hirsutum
tcaaagatgggatcctattgtccaaataaaggaggccaccaactttcccaatggctgtccgatataatggcaatgatgatttctctccagaacaccatactacacattccgatgcacttcgcattagcttccgatgttttccgagataccgtcctacaggatcaaaaaacagaatcgtgctaaagagatagaatccgtctttctccactactcccattactaaatgaactttatatctacatgaaattttcgcaagtctatcaacttcaggacctgtgtacataaaaataaccaatacgaaatcacaaacaagacgaatagggcatctcaagttctgcatacaacataatagatcatagaaacaagaaacgattgcagcatcatccttagatagattaactaacaagtgcatcaattgttagaatctgctaaacttccaactcatgtttaaactagaaagttcaattcttttcattcttggacaacaatgtctgcaggtaaattaatctggtattaattactttcatatacacatatggatcctataaatctgtttgaaaggtgaagagctgggacctgggacctcaatggcagaagcatgatacttgggaagctcctgattatcttcatttggagactcaaaaggaaagccccttggatatccaccaacaaaggcttctg

SEQ ID NO: 13229 - DNA, 677 bp, Gossypium hirsutum
gagcacaaagtaagatggagaagatttcaaattaaagctaatagtgagttagtaaagtttttaatgacataaatatatccctatttgtcaaatatactattgattgaggatcataactgatatgatagtaataacctacctaataattctcgacaaaattgtaaaatatgatttcaagtatagaaggttatttttcacttatacaataacaaatgataatggcaaaatcagcattaacacttcaacgaaatcaatgaacgggtaaacctaggattgttcgttaaagagcttttagtcaaggattgacttatttgttaaatcagatgggtcgggtccataaccattaaaatatacaaagaaaataaatgaatgaaagtgctttaagtattcttagacaagtatctagaatgacaatgcacataatcaactccaaagaacgacgcagaaaacaattatcattaataaaataacacaacgttatccatccaaatccattagctaacacacaacagttttcggtgaaaatccgagcttttaatggtggcggaaacgctaaatcctgaatttaaacactaaatgcaaatgctactatgttccatctctacaacaaaaaacacctcctttatctcttaagttatcatacaacatggattcctcaaatatgcaagcaactcaag

SEQ ID NO: 13230 - DNA, 651 bp, Gossypium hirsutum
aagaactaggagaaagttgaaaagagattgaaagtaagtatctaaattgcagaaattatcaatattaaaaaacaaaagataaaaagaaaatcagcggaaaaagaaataagaaaatgacaaatagcagaaagtgaacaatgaagagccgcagtagtatatctattatcgaaaaggaaacatcctttaaacttttaccaacttaataagtaattcacaaattcctgtatgtaatcttaatatatagagattaatttacacctttttccgaacacctaaaagcaacaaatcaaggaaaaatgcatcgatatccatcaagctcttcccagtttctacctcttcaagtaatatatagcagattatgtatcaagctgctaaaagtaaaatgcaagtcttacctaacaaactacaatccgtaacatggatgagtttaactagaaaggtcaacggaaaatataaatagagacactacgatcttgatatgctgtaaagtttgtccaaaggcctgttatttactctggttcaacggacatcaaattcttcaccaaatctcccatacaaactttgatcataagaaaaaactgttcaaagaaatcttactgcttatatgagtcttagaaacaacaatggtagttctgaaaccacccatgagag

SEQ ID NO: 13231 - DNA, 551 bp, Gossypium hirsutum
  misc_feature (505)..(505): n is a, c, g, or t
tagtcattcaacattcaaccattctgataattaccttaaaattatacccttaataaacaggaaaatttcctcaaatggacaagataagcaattttaaagacaagaaggatagatcgaagatagagaaacatattacctacatgccaagcaatccttgagtgaaatttttactggttcagtttgctgactcttaccagctaaaaccttcagcaaagcatttcaaataagaaaaatttaaccaaaaataacgaaaattcattcccttctactgctaaataatttgataaattagtagaattaagcctatgcgattataaaacatcaccaagctaaaacaggaccaagttacaaaaaaaaataataataataactattgcatgcaattccgaatcaaaattggaaaaaatcacaaaaaaaaatccttaaaaaatggattcataattgaggaaagtaatggagtaaaggtgtaagtacctgaggttcaggtttcttaggggtcgctttngatcctttgaaaaaaaacgacgcaggcttgagacggtgctatgaaa

SEQ ID NO: 13232 - DNA, 666 bp, Gossypium hirsutum
ccttgagctcccatctatctaaaaaagtttgaaattctttgttcaaaactcaatcacttgagctcccatctatctaaataatctatttaaaaaaataataatcatggtttaaatggattatctatacaaatcccggaagagatttatgatgccgcactcagcactccaatctctttcaacgaagcaaacgaggatgtgttatgctggaaacatacgaatgatagagacttttccatggccaacatatacgatgtggctgcaccaagtgtgaagactcaacctttcgaaagcgaagaaatatggtgatcactatggaaagccaaactcccatccaagctgagaatttttctttggaaatgtgttaataagattttacctacggctaacttcttgaatgttagagatttaaatttctaggatatatgtcatttctgcagagtcaattgcaaccatattagtcatattctaagagcctacagcattgtcaaagactggaggactatcaccatggcgcatcataatcgtctaccgcccttagatagtgattgggagaactggattttctccaatctagattctaaagtttggattagtaacccacagctcccttggtaccacgttttctcctctgcactaagagaaatatggttgctgagaaatgccatg

SEQ ID NO: 13233 - DNA, 662 bp, Gossypium hirsutum
agttctatctttggaaaaaattacataacatgcggccacattttggcatgtttgtttagccacttgtgcgatacatgatgcttagatgacctttcatcagtcagatgtgccctgcgaaaatcaccggtgtaagctaccgttgggcaagttcaaatgcaacattgatggtgctatatttgccaacaatagggctatgggttgggctgcacttgtaaggaatgatgcatgtgattttctttggtgcatctctggctttatgaggagcaacttgatccttttatggttgaaactcatgctgctcacgttcatggcttagatcttggcaagtggatgctatttttttataaactaatagtcaatgcctttggtacgctctctcccatggcaatttggatgtttcggactcgggtgtgttgcttcagaattgcttccacattagttatctttttcaatttttatcctttcgttgacctccaggggcgaagttagaaaattttgttagggggccgaaattaaattgttctttttaagagcctatatttttataatttttaaaggattaaatcaaatttttatcatttttaaggggcaaagtacaattttacctttactaaatgaacaatttttcattttagagggtcgggtccctgctagcctaccta

SEQ ID NO: 13234 - DNA, 551 bp, Gossypium hirsutum
tacgtttacattgcattgcacttcttattcacaatcgattatgatctttaaatagttccaaacatggtggtatcgaaaacacaaaacaataaagtaatttagccgccatgcggatttcaaccatctctgcccataaaatcccaagaaatgtatggcgggcagctttagggaataataagctcgcctctgcccacaaactgaacccaaaatcctcaactctcgagcattttagaattgttggttgctggtgtaagtcctgccgaaaccccagtctgatggcacaacgtcaaggaactgtcgagtaactccatcagtagtggtgactttgaaagacaatgattgaccattgagataggcattggattgccagttagctccccagttcctcgacattgccatccacccagttttagagcccttgatggacacagactggatcgatcctgctccacccacattgctaatcaaaacaagctcgaaatagtctctcccattgatagtgaaccttactccaccaggcttattgcatggaaccctgcaatggaagagtt

SEQ ID NO: 13235 - DNA, 632 bp, Gossypium hirsutum
agtttatctttgaattgctgcggcgaaacactagaaaatgacgaaccatgacccaatcatcatcttaatttccaagttccaaaacgacttcgtttccgggcacaccagctttagttgatcttcatatatatagggttaattgcatcaaacacccctaaacatattgaaaaagtggaaatggttcgccaaaaatgggttgagacatgtgatttagctatgaagatattagaagagtagccatttaagggggtattattatgattgcattaaattcaataattaattaaaaaggctgatactgggacccttctaaacaagcattagttaatcaattacttaacatttttgtctatggagtatccaatggctatgaggctggccactgggtgattaaaagtgttagttagggtaaactagtaattaccataagtttatttcaatcatttaattattaaaagttataaaatggttatcaattatttgatttttcttgtcacatgtccacaaatgattaaccaaaagatgacgtgatagcttttaaaattgacataataacaactttaaccttcaatatattgtgtcaatttaatattgattcttaaaaatttagctctcaacatttgcacattgtg

SEQ ID NO: 13236 - DNA, 650 bp, Gossypium hirsutum
acttgaacacctcttatgcacgatttggtgggaagactcatcaaaactgccatttatgtaacgatgaggcatgtcaactttggagtacaccatccatattgaccattcagctcttcgatctttagcccattcatcacgaaggaagtccaatatccgtgttttactatccctggaaagagacttaagttttaataagagggatactgagcataacaagcctacatttaggggagaaaatgtttaacagcaagaacaggaagtgaagatgtatgtgctaacctgtggaaattcaggaaagtgttccataaataaaacacttgatcacccgatagattaaatattttaagtacatcatccttcgataaattatggagcaatctatcactttgaaactctaatctgccatttactctctgttaagagacaaaggtgttatcattttaatatattaaaacacaaaaataagaataagagtacactgttcgataacataaagcaaggacctcaagaccattttgtggcttgccttgtgctgaatcttcagcatcagcagcaaccggttcttgcagaaaggaatcaaataacttcatatcgttcattttggaggtaaattcagtcaaatcaacagcatggttaatggcatcacaaag

SEQ ID NO: 13237 - DNA, 365 bp, Gossypium hirsutum
tatcatggttgtcatcaccaacttctttggtaaacatgaagctgattgatgtgttagacaaccgtttaccacttccaacaagccaactagttacacaaaatcttgttcatgttgctacactggctttcgcttgcttaaatccacaaccgaagtcccgaccaacaatgaaggaagtgtgtgaagagttcctttctcgccatacatccttgggaattcctcttcggatgatctctttgttacaactcatgaaccgtgaaatgcatattggaggcaaaactaaaacttgtggtgtttgaagtccatgcgctttttgattagatactgtttatcatactctgataacttgtttgtaaccatctcaggta

SEQ ID NO: 13238 - DNA, 598 bp, Gossypium hirsutum
catgacaaacaagaaatgaggaacttataaatgttgctcatataaaattcaatggatagcttcaagggatactatgcagtatcagaccaatggtggaagttcaactaaaaagactttgctagtctaaaaatatacaaggagaactgcactctcacatcaagcatccaacctcaatcgaatttcattataaattctccataatttctgcaaggaatatacaagttacctgaataccatcaggcatgttcattgaagaaagcattaaaaccgcatcttggctgaaattaatttccaatctccaccgcttttgagcaacctgaatatgaataaatgaaaatgcaaagtcccttatgtgttccagaaaagaagaataattatttttggtacaaagggaaatactgggtcaatgccacattttgaaggtaagtgttattcagccactttaggccttacctcgactacacgtcccactacgacatccccaacctctggcttgtacctagaagatttaataattcgaaaataaataaattccaaaacaacaaaagaagaataataggattgaagagagattttgtttgagaatacctagcgcgta

SEQ ID NO: 13239 - DNA, 673 bp, Gossypium hirsutum
ttccatgctagacattgtgtattggtttttaagtgggccttgtccttcaaaggaggtcacgggtccatttatttttctttttcaaagtgctcgttaaattttgtttttgattgcctcatattatatatatgattcttcttagcagtcttttgaggctggcttattaagtaaagctttttaaacagttacagggtaacattgacctcttttgtcacgcaaggaacaatattactgccatgctaaatgagtacgtggattttcttagtaattatctgttggtgattaataccttcaaactagcattttgattttttcttgggtttacccttgtgcacgtgtccgggttattaacttcactgtgaccttttgcagcatgagagagatgccaggattaatgagccatatgccaccattacctgtatctgttaatgaggatttagcaaatggcctcttgcctggagcaactaatgtcttgcctcaggtaggttgtcatttaaactgattcagtttgcatgtgctggggtgggtggccaaaaaagtggagtcgtagacactgccataagctaaaaatttgttcaatttatggaatctgttcttatatttatctaattgaggtttcatgcaaagccttctttatgctggttgagaatgtaacctttctgggttgatctga

SEQ ID NO: 13240 - DNA, 648 bp, Gossypium hirsutum
ctacatcaggccctctacaatctcagaggctttcatttttagtctaggaatcacagctttcttcctcccctaaaccctattcccctctatttcgctctcccgctccgcagtagaccaacctcccgtcactatgagcagatcaggccagcctccagatctcaaaaagcaagttccttttcttcccacacatttcaatactttttttttcttttgaaaaattgtttttttgttctttctttcttttccccttacttatttcttagttcttttattgatgctgttttcatgtaacaggtacatggacaagaaactccagagtaagtattctttcgttgttctttgcatagtagtaaagcgaatgtcccctgtttattgtctgcacctaatatgtgttttctctttggtatgacttttaaggttaaaaaaatagtttttattctttcgtgtatgatgttcgatttttttatatattctcgtggatagtaatgattattactttgcatattttgaatattgagctacttatgagctacagtcaatcttagatttaggtttgcgttcttatggtatttgctaatacgccggtgccttaatgtgtaaggaatttgttgcttctgttatttagtcttgtaagttgcatgtggattt

SEQ ID NO: 13241 - DNA, 454 bp, Gossypium hirsutum
atccatagcctctctcaacccataaataggaaaataatgcattttagcgcactcaaacttacgcctttctgaattgaaaaaataaaaataataattttataattcaaaccaattcttatctcaacaagcccaacataatttaatctgatgagttctagatatcaatcgaataattatgatgtcataatatttaggttcatcaattcatatcatttttcatctagctgtctgaaagagttgttttcaatgtaaatgagatatagatgctatatttattttgtagtaaataaactttattgaataataaaagaatggcaatggatacatctaattccgcagaggagtcaacaatgtcattagcctctcttacagtattctaaaacgaaattggatgccaatggaagacttctcagagtctccaaggtttaggattctatttgcaccacttcctaaa

SEQ ID NO: 13242 - DNA, 612 bp, Gossypium hirsutum
  misc_feature (543)..(555): n is a, c, g, or t
  misc_feature (571)..(573): n is a, c, g, or t
tcattgttaagggggggggggagttagagcctctaaattacgtgatattatttcatacactaatccaatatgaaatcagtggaaattgcgtatctttggctctttaaaaataaaaaaggaacccattgctctcttagctgttcctcactcacaacgcggcatttcactctttggatgtaccgtcacctcacccaatgctttaatccaaaatccttgttcttcatgtttagtcggtaaacatccccacttcacttcaattctataatcttttaccacattaaattaattaattacattgttttgttgaatttaaatattttttttatatattgttagaatcggggaaatatatatagttagaagtaaacgtgttgtaatggcagtatttgagcgtatttttccacaggaaaagccttttggtaggaaagatgttgatacaaaatatatgctattggaggtgataaagaatatttggtacgcatgcgcaaaattagtcaagcttcctctttttcctttttaatttctttattttgtccacaaatnnnnnnnnnnnnntaagatgtttcatccnnnaggttatcatagtacagtaacaatgatcctttaaatcac

SEQ ID NO: 13243 - DNA, 670 bp, Gossypium hirsutum
ggggagttggatttttgggtcatattgtttcaggtgatggtatacgggttgatcctagtaaaatttcagccattgttgattggaaaccaccgaaaaatgtaactgaagttagaagtttcttggggctagctgggtattatcggcggtttgtaaatggattttctataattgctgctcctatgactagactactccgaaaggatgttaaatttgaatggacggaagaatgtcaacagagtttcgaagaattgaaaaagttattaactgaagcaccagtgttgatacaacccgaatcaggtaaagaatttgtggtgtatagtgatgcttctctaaatggtttggggtgtgtactcatgcaagaaggaaaagtggtggcttatgcttcgaggcagttaaaacctcatgagaggaattatcctactcacgatttggaattggctgcggtggtgtttgctttgaagatttggcgacattatttgtatggtgaaaagtgccgagtatataccgatcacaaaagtcttaaatacttgatgtcacaaaaagacttgaatttgagacagcgaagatggttggagttattgaaagattacgagcttgttattgattatcatccgggaaaagcgaatgtggttgccgatgctttaagcagaaagttgttgtttgctttgag

SEQ ID NO: 13244 - DNA, 647 bp, Gossypium hirsutum
tagagctccatgacctctccggcatcttcaactatcatatcatctaagctaatatcttctgaggccactacatcctgtcttaaatctcgcagctcgctatcataggcagtccgtgacttggggtcactaaggatttcccatgccttctgtactctcaaaaatctttctccagtctcatggtcagaattcaacttatcaggatgagaattaaggatagctgtacgataactcgcacgaatttcttcataactcgcgtcttccttaacaaagagaacatcatagtgggtttctcggacagagttacttccgagaatcatggttcaccaccactgttcaaaagactaatatcactgcaaatacaaaaaaatagatttcacaggttagtagaaactataatttacgtcttcccctatgaagggcattgcaggcagtatttgaaggttaaatggttaggtcatagtagttcatacttaaaaatgacttccccaaattcagagattgacaatcaaatgacagatatcagaaggattaaaattacaagcattattgaaaactaaaacttgtgtctgattttcaagaagaatggtaagcatagtatgacttaaattatgaatgaactaaggaaaagaaaccctaagaagcagaag

SEQ ID NO: 13245 - DNA, 655 bp, Gossypium hirsutum
ttccggaccaatagctccctattacaaaaaaaagtaacttaattcaatttgtaaaattagtaattaatttgatttagttacaattaaattagccttaatttgaaaagatagacaccataattgacttgataaaaataattataatccgaatttaaatttgaacccaacaaaagttattcgaattgacttaatttaaattagatcgagctagaaccaactcgactttgtaaaattaacaaataagctattcaagatttactgtaaacaattctttatagagattatatacatacatgtatcgcaactttatttttcaatacttttatatagccaattcaaattaattgtctattaactcgtaaaagttaaaactcacttgaaataagaattatcgaaggtaagtgggttggtagtccatgctccatcaaatccagaccggtccttatggcaccttccctgtatcaaaaagcaaagcaaatgtttaccatatttaaatggataagaggcaaacaattctctcaaacttaaagaaaaccaaagggaatttcgaatttataaacagaccagcgtgtgggcaccagaaagggcaacaatatccttatcggttaaacccatttgattaataaagatctccctcaaacgatccgctcctaca

SEQ ID NO: 13246 - DNA, 665 bp, Gossypium hirsutum
ccactatttctttggaaccacaaaaccatagttcatgatcagattgttatcatggtggcattgtgacacaacatgtggcatgtgaatttctctggtaccctaacagaatatgtagtggttgagcacacagcttacagtggctgaagtagttgatgttagggctccattttagaaactaattttggattatgttcgagttctgacggatttctaacttctcaatcaagtttgagcagctttttcatgcgttaaatacacacaaactcttattttcttaaaattgttccatgtatgaaaatgtagattgctctattatgactgaaatatattcttggttatggtaccatagctctaggggctcgttgaataaaaaactatggtcaattcatttttcttttttggtaggttagaggagttaatttatttctttttttatgtcctcttcttgctagcccaggagatttctttttctattttctttttcttgacagcaaagcatttctctatctatgttcccaaaatttacttacattttacgaataaaagatgttataattcagtgttgcttttagttctttatctccacttgattgctttccagtgcaggagatcaatgcaaatacaatatcctaaactttatgtcaggcacatgtaagtagcatatg

SEQ ID NO: 13247 - DNA, 616 bp, Gossypium hirsutum
  misc_feature (55)..(57): n is a, c, g, or t
aattttttgtaatttatttctttttttagttaaatttagctcctaaatttttaannntaatcaaatttaaccatcaaccttttgaaaaagagttgaagtggtttatttgatactaatttttctaaaaagaattatgatcttttatatttttaattttgatttgatttttttatttttataatttttaaattatttgttagacgttaaataatattatgtgaacatggattgccatgtgaattgtcaaactaataatattaaatattaatatgttagtcactatttccattaaaaaaagtgatctaactctttttgaaatgttcaagggtcataagaccaaattgacaatatatatatattttaaaaactaaatttatcattatgtcttattacaacatataaagtatatggaagttacactgttttaaaagtatatggtatcgaactcttatggtttagggttgtggtgctatttttccttcaggtttctccactcaattattccgaaagtggtcctttgttaagcaaacaaaattacaaaaatgatattccttctacttctagactttcaatagtttgcagtcttattacgaatatccaatactgccgggagata

SEQ ID NO: 13248 - DNA, 652 bp, Gossypium hirsutum
gatcaggatgattaattggacgagaattcaacagtgtcccgttcagactacccatgtccaccagttcccatctcaatttctataaagtttgtacacatttaaaacacttagtgaaccatacatacataatgcaacaaaatgcaaatcatgtcattcaacttataaggagtttacatttaaattccaagttatcattgcatgctttccagaaacctcataatccttcaataataaataacttggaggaactcttccaagggtcaatggtagccttgcagtgcttgttgacagtacagaacaatgaagtccacaagaaggacccgagacaacctgaagagagaggcaacttcctgcacttctaacagaaagatataattacatgcttcacatattcagtctaatagaaatagaccaacattttaatctccttatagaaaaggaaaattactttgatcactgatagcgtcggtgttgggcacagactcttgtggtctatcattttccgtgccaaatctcaagttttgactttggttttctggtctaccatgtttttgcagttcaactaagtgctctgtcaccactcgacgctttagtgtctgaccaaccaaaataccatctaaaggatcagatacatctcccaccacactatcac

SEQ ID NO: 13249 - DNA, 427 bp, Gossypium hirsutum
  misc_feature (363)..(363): n is a, c, g, or t
  misc_feature (366)..(366): n is a, c, g, or t
ttttgattgatattggtggtaactgtggaataatataagatttatattttagtttgaaaagataaaaaaaaagtataatgataaatttaatctttaatatttatttattttatctctttgattctatttttttttatcactttgacttttttcgaggtaaaaaattttattgaaatgttaaaattttaatagtgtgatattataacttatatggcatggtagtctgtatatactttacaaaaaaaatttaaataaaaataataaatttagctttcaatgtttatttttattttttttatcaatttagctcttaatctttttttaactaaatttgatcctcaaccttttaaaaagaatcgaatntgnccatcaatctttcaaaaagagtcgaattgttgttttttaacaggaatgcttactaaaacgt

SEQ ID NO: 13250 - DNA, 560 bp, Gossypium hirsutum
tttcctacccaatcctaacccattgagaaacaaaacaaagtgtatatatatagataagaagactcagaaaacaaagaagcagcagcaaacatgaaataaaaacaaagtaataccttgagagaaggagagaatgaaaagcattgaaagaagtagtagtttgagaaaccaagaaccacccattatttctttaacagtcctgaggaatggctacttcccagattttataaacacgctgttgaatgactgcttctacgaagctgctaagcttcttcagatccaatgaaattaaggactttaaaaaacttacatttatctccacatagattatagaccgagcgagttttaataaagtctagaatttaatgtaatcttttttgtaagtacttgttgattttaatgaactgaactttgattaggagagtacatcaagttcaagttcgacattagaatattcaacatgttactcgagtaaaaaatatttttacaaatggcctcattgaaagattcccactggaggaattagtctaatttttttatggtaggtttctcttgtttcacca

SEQ ID NO: 13251 - DNA, 658 bp, Gossypium hirsutum
aggcaggtaaggctaacaaagaaaagttgagtgacccattccttttaagatgagggtaaaccaaacataaaacgtgactttatttgtgacaattttttaagaaaagtgtattctaatatttaattcaccaaagcatttctatacctattcaaaatgaggctatccgtcaagatatgaaggtccatctgaaacttaggagggtttgaataaaaaatattagacctcaaaaatgggctttggcaaaaaaattagggttattttaaatatgagtcggaattaagtttaaacatttaaggcttgagtctgacctgatctatttttaatttttataatattttatataatttataacacactaaaaaaaataaatctatactagatatataatactactttaatgtaaatattaaaataatgttaaaataactatataaaaaattcaataaataaagcatatattaaattattaagtattaaattaaaataatataaaaaataaaaataatatgaacgggtctaaaataagcataaattaatcttttgtaaatatgagagttatatgcaaaattttagatctatatttcgggtcaagtcgagcttgtgcaaacataaaatttattaatatcatatttagactcgacccgaatctaactcaact

SEQ ID NO: 13252 - DNA, 697 bp, Gossypium hirsutum
ggcatttacgagattccttagaaattcttattctaatcctgataattttcgaaccctgtccgtgaaacttggatgttaaaatgattttggaactcttaagttggtagggtgggaagaagggataaaaaaatatggaagatgaaaaatataatttcttttttgtaagtgtgcttggttaatagttggattttaaaaaagaaaataaaatatttgaaaaatatataattttgttctaacatatattcttttatcattttttttattcatcatttcaatttatttttatgtcataagataaaaaatattctcttctgaaagtttatttttttattctcttctatcatctttaattttttcattcaaacaagtatatcttaagatctcgtcttcaaacaatttcttcgctaaacgcaaacttttttgccttctttggtcagtagatgatggactcctcttgctgaagaaatcggctctccatgaccatactgatgactctaatggagctcctgttagcattgtattttccataatgaaatcgaaattatcattttctggaaatctaatttttttttagatgatagaaatttaaacgaaaaggtgacaaaacaatgaagtggagctttctaggagaagagataaataggatttatataaattaattttcatcttatatcaatgagggtatttggtttagtgg

SEQ ID NO: 13253 - DNA, 675 bp, Gossypium hirsutum
atagagaaagacacacacacaaatatgctttagatttcagaatcttcatacatatccttttatctcatgtatatttgtttgtcttagattcgacaatctttatatttcatatctgttttagttatttttttttcctttaaattaactcaatcaccttctgcatcagattgttggttttaaattaattaatcaaattttaagttcaaatcatttcaaaatcgaataagttatttctagtgtaagttattttaatttcaaatcattcaaattaattgatcaattaagttattttttcaaattcaaatagagattcaagttagttgattggataaaaatgacaatctaaattgtggatttaaatatctaccattcaaatttgaatattaaaattactattaatctgaattacttattttgcagatttggaaggaaattaatatataagtctaccctccataattttacaaattgtatttaattacttagataattggcgaggttaaatcaattagaaattttcaaaacgggaagtgaggttaaattgagttaatgggattcaaataaaacttgaaagctcatgcaagcacaattataacaccaaaacaaacataagcaaatcatcagtaccttaaagaaaacatgagtaccattatttaaattgccattaagttctca

SEQ ID NO: 13254 - DNA, 275 bp, Gossypium hirsutum
ttgattaaagttaaatcaatttttcccacttgtaagctatggctttgttattataaataattaaagttgtgtgaaattcagataatactaataatgtcttcaagttgtcaccatggaaatggcatctcagttctcatttatactaattgtaaaagatgacgattttatacgagaaagaattcattttgaaaggagcacttaaaattacataacgtggaagcaccaaggacatccgtcatgcaaaaaaaaaaaaaacaattaattaggcttttggt

SEQ ID NO: 13255 - DNA, 696 bp, Gossypium hirsutum
ggatatcaacatttgcagcatactcacataattcagtgactgaaatttagtaaacaatgatgcatatcagaatacttgagaggaagaattgaaaatttactgatgtcatcttctctaaagaggccctcaaaagaaactaaggctgtttacttacctatctcataagtattgctctcatttgccactgcagtcaacatttcaagcttcaatcgtttgacataagatggttcattatactggcagtagaaatgtttgtagtctgaggagaacacataaggtgctcgcataaccaagagatgtagatgacttaaaactgcataagactgttctgggcttcctgaactaacaagggtcaacagcggtgctttgatacgttcatacacctttacaacaaaagaatttcgttagaaaactcctgattccgtaaactagtataagagtattactaatctatcacacacaatcaagtatagtttaataatatcaaggccatgtatgatgattcacggttgaagacacatgcccagatttgcttcaatgacaggaaattaatgactaaattacaagctttatacagttttagagaaaagaaaggggaagatattgatggcaaacaaaagaagcacgaattgcaggatcaagattaactgaaaagcacctccttgatagtaaacatgcaggagatagcttgattga

SEQ ID NO: 13256 - DNA, 613 bp, Gossypium hirsutum
tgtcactacttcatgcaggattgatggtgttgttggctccttcttctggaatttggtttagtacttataatcttcctttcccaggacatgttctaatatatggtccagcggtgagttgctacaagttttgcttcttttgcaattggttttgatcaagtgttaaaggttaaaacatgtttttctctaatttttacttctggggagaaagcaaaatgtcatcaagcattgttattgcacgttttttcttgaacaaaagtaaaattctcaagtttatcttgtagagagttttgtggtgttgcaagtagatatcactttatactgactttttctttggcaatcttaaattctcaaccttgttggctctttatgttttgtgataaagaggttggtgcataatttcttttacctatctttaaggatgactctttgaaactatgctctcttagaacctacttctgttgttcgtaggagggctttattgtatttatttgacatatacttaagtaaaaattggaatattcttttctattagggttctgggaagacattattggcaagagctgttgcaaaatcccttgaagaacatgaagacctgtttagcacatgtgtgaca

SEQ ID NO: 13257 - DNA, 516 bp, Gossypium hirsutum
tatttatttcttcccaatggcctttttcttattatcttcaccacgtatgtctttgcatctgccgaggataatgctaatggttcgatcgatgtcttcctccgatctctcccctgcatcactgcaaaccgcattgctaaaccttctatccatttccaagcttgatggacaattaagaaatctatccaatggtaaacttgctacttctttttttgtgtcggggttcggttttcgggacaagagtttcgttagttccttttgtagtttcccgacttcttcgaccgtgaactcctgtaaatcatcggacgaacatggctcttggtcttgaatctcaatgggatcctgttcaatggtgctttgggattcagggttttctttaagctcattgttaccaaatgtccctattgctaacagtccatgtggccaatcactgaactcctcccgaggctcttatttcatatgatctacaacagaaaaggaaaaatgttacactatgtgcctagacatgacttaattcag

SEQ ID NO: 13258 - DNA, 654 bp, Gossypium hirsutum
atgtgcttgaggtgtctttcatgggatgcagtgttaaggtgaagaagtgtggtgttagaatagtgtatgagaaagatttggaagagataaaagagttgcagtgccataccactcaatcttctccaaattttgaacacatccaccaacactctgctcacaaccatggatcagtaggtagcacttctcacataaaatagaaacctaatatctacgatgaagcggaggaagaagggccgcaaccaaaacggatgcaactttttttcaatttttttataattggccaatccgggaagacgcattagctatggtaaattacttaaccaaccttgtcctactaaaattttttactcatctaccttgtttacatcttttatttcatttaaagttatcattctagacttatttccgtatgagatatgatcattttataatatactaatttttttaaaaaaaataccatttaaaattttattcacttaattcattcctttttacataattgaaatgtgtacattttgatatttattaaaattttattctcattatatatattcacttacgtctatattttatttttaggttgaagtaaatataatcaattgagatagaaatgtggagaaaaatagatagcttcgacgacgatataggtaataa

SEQ ID NO: 13259 - DNA, 699 bp, Gossypium hirsutum
gttcaatttcgaagtcatgctcaaaagtttttctctaaggtttattgctttatgttcattgcaagattttcttgattggggaaccattgtatgccatgtgtagacattcttatataggtttctttgatcagtctcttatacttgcgtgtctgtggttctaggttgcccgagagtcaaatggtggctttgagagttccgctaaatcaattgagataccccctcctcgtccaaaaaggaagccaacgcatccatatccccgcaaatctgttacgtctcttaaaggaatatctccatcatctcaactagagaggtctctatcccccaaccactctgtctcggaacaggataacaaatcaccctcatcagttttgtccccatttgttttcgatgcaatggggtcttctgcctctgagcaaccaaatagatgttcttctccaacttcttgtactactaatatacagtcactcaataatacatcccctgttgaaaaggaaaatgactatgtgacatctatagagaaagagagtgaatctttatcatctattaaagtatttggacaatcatccgaggaggacattttatctttggtaaaatctctgccctttttcgtttatggaacaattattactgacctttgtcttagaatttgaactctgattttctttctttcttcatgtaattacccagaaatccaacaca

SEQ ID NO: 13260 - DNA, 611 bp, Gossypium hirsutum
tgttgccgagccttcaaatctggaagaggtatgtaaatacgcttatcaaaacgccggcggatggcctatataaacaatttattagtaaaagaattcattaccaattcaatacgaacaactttatttatcgttttcaatgcattagatgttaacaagagtgccccctaaggatgctcattaacaacatcctattcccctttacctgatcaagcgcgtaaggagtatttgttgctgcaagcactaggactttctgatcattatttccaacgccctaaaacataaacaaggtaaaaaaaattcattcattaagctaaaaatcttggaaggaaacaatagctatgtgtcacaatctggcatgggtgtaaatgagacatgagcaccatcaaaatacaaacacgccatcatggaggttctcaaaattttaggataaagatgctagcatactgcagaatctagcaggaaaaaaatatcttgcataatatttaaataatttctaaacaatataaacttagtctttctaaatatataagattttggaaaggaaaataatttcttgaatagcttctggcaaagaaactttaaaactcttcttagcaatttcaccacactga

SEQ ID NO: 13261 - DNA, 574 bp, Gossypium hirsutum
  misc_feature (560)..(561): n is a, c, g, or t
gggtttatatatatggtttagtgggttgaggttgttcatccattgaatttgagactgatattaatcgaacgacttaaatttatgccctttgccactttatctgtgatttagtgacagctagggttctatcattgatattgtgaattgcgtattagtttatacaagagtctcttttttgatgaatgttttaatgaatttaataaatatcataactctaagatatctaactctttcaaatttttcgtcctcaaatttttcttccgtatattatggaggacgtgaagacgtgatacaccatgactgctttttatttgcatgtttttatcttgctaatgcttgactaactctgaacttaattcctcctaactctactcgtgctgaaaccactcttgtgcaatacaccttgctttttactaaaatttttttaattttattgttattaattaaaggaatttggttagaggccttgggtagaatgccatcatgtcctgagatccggttcccgcaatcacgttcccacattttccttttgcctctttccctttgcatcccctcaaatnnaaaccaagaagta

SEQ ID NO: 13262 - DNA, 605 bp, Gossypium hirsutum
tgttaagggaaggaaaggaaaagatagaactaaaggaaatgatatatgttttttttcgtttaaataaatgaaattaaaaaatgaaataaattataaatgtgaagatttttttgtattttgtttggttaaactatgaaagttaagtaaacagttatttgttataaattctttaattatattaaatttataaaataacttatctaaaatgttaatatgatataaaaaaaaacaatattttgtatcttaaatgaaacagtactttcttttcccaagtaactcaagagttactttcgcttacttgaataaaaaaatttatccaaacaagagagagaattggtttcacttactttttttttcccttatttttattcaatccaaacataagactagtttgtcaaattttgttaattgctttttctattttaaatttattactatcaaattaagaagtatatatttttcattataaatgtgataaatctaaattttacttataaaaataattaattaaaatttaaaataatagaatcttttaaaaaaattgacttttcatataaattagttaaacaaaaaaaatgaaatgcgtgtagtctctcctaggattg

SEQ ID NO: 13263 - DNA, 627 bp, Gossypium hirsutum
  misc_feature (63)..(67): n is a, c, g, or t
gcaaagataatcaagtgttataaacaaaaaaaaatatttcctaaggtgttcaagaattctacnnnnnacacaattatcctaactaaccaactttaaaataaaaaataaataaaataaaaaaagaagaacaagaacaagaaaggataaacaaatataactattgataacagactaccagatagataacactcataaagttaaaattttaaagaaaaggatcaagcagggttgccaggggcacaagactcactccaggcactagaaccgttatattgccttcggcacaaaaaaaggggtatcctgggtgaagtaaagtgcaatatgtacatatatgaggctttgcaagtctgcgtgtatataatatataaagcttaagatacatagttaactctaaagtatggtcaagtttaacatacaatctttttattgatcaatatgaatgattcccttttggtcaaatttgttgttgaatgcttagtttgatcttatccctttcttactagtaaaggtatatcaaacgaaaacaatgaaaaattaaagaaattaaagagaaattcaaaacaggcaggccttttttatgctcatcgccttccaaaaaagcgcacctaggcacacaccttgacaaaa

SEQ ID NO: 13264 - DNA, 680 bp, Gossypium hirsutum
  misc_feature (666)..(666): n is a, c, g, or t
acctcgtatctctacaccgcttgtaacgaaaaccgaatcatcgatcttcaagagattttacaaagattttcattcattaacatttgtaaagtcgcgtttggtgtagatattgaatctatggataattcaggtttcgctaaagctttcaacgacgccgttgatatctgttcttcgagattctttgctccgattcccgccgtttggagaatcaagagatcgttgaacatcggatcggagaaaaaattgaaagaatcaatcaaaataatcgatgatttctcttttgaaatcatcaaatcaaaagcaaaacaagaacaatacgattggagaaatcaagatctgttatccagattcatggcgaaaacgtcatcggagatagaattcgacgacgaagcaaagaagagaaagttcttacgagatgtaatcataagcttcatcctcgccggtaaagattcaacgtcgacggcgttgacttcgtttttctggttagtcaacggtcacccacattgcgaccgtttgatccttaacgaagtaacaacactagatcctactttcacgtacgatgatttaaagagtttgaattacctacatgcggctctatcggaatcgctacggttgtttcctccggtaccaatcaattcaagattaacggtgagtgatgacgtttgnagtgatgacgtttg

SEQ ID NO: 13265 - DNA, 651 bp, Gossypium hirsutum
tcacatgacgaactctttgtttgggcaccatcggttggtaaccttaaggacttacctcttctgtttttccggcaaccaccaccgactggcacgttccgaagtgaccctcctttagtccaatatcttctacaacctttacagaagtacctcggttgtgttaagctataattgttgtaataacagaatttggtattggaagaaccacatcttggacaatttggtgatatctccattctaggcttccatcctctctccataaccggttaccttgactgcattagctttcatcaaagaaaactaatttgcagaagagagagaagggtttcaactttcaactttcaactttcaagtgaagaaaaccaaagaatgtcaatagagttataagggcacatgtatggtttatggggccttggaaaggtgcatgagattgggagggggaggggttggggtgccgttaagggcgactgctggtgtggaattagtctcataggctaatccattgtgtcggtgcaatgaaggaggtttaggaagcaaatgcctcgagaggcacaatctggttttcgttcaggagccgacaacctagatatgaaaattaatatataaaaaaacaaagaacccatttattcattccaaacccaaagagtttaatgt

SEQ ID NO: 13266 - DNA, 584 bp, Gossypium hirsutum
gctggcatttctctctagtggaatgattggtttttgagaccatttatccttaatttggtccaaaaaacttggcttgggcttcctcttcttcttacttatatcaataccaacctttactgtttgatgagaaacacaataagatttgaatttgagtgctctgaaactgttattgtgggtcttggtttgcaaaataagataataaagagaatgtgaagatgataatgggcaagcttgatgagttacaggaaatggtgagagcgccatggctaaactccagtaaagaaaaacactgaaacctttttcatatcatagcagtgggagaattttatggcgcagtacttgcatattatcgatcagtataaatgctcccagattgaaaatttttgggtgtggagggctggcccaaacaagcatttcatgaatatccagtccaagcttaatctttggactttttctttttcttctaccagggttaattacctctaactccttaaactatattccacattctactttatcccattcttctaaaagggttaattaaatctaactccttgaactatagtccagattctaaattaacc

SEQ ID NO: 13267 - DNA, 653 bp, Gossypium hirsutum
ctttctttatcccaagaccaatcacaaaacgcatttttgagttctgccttctaccctttaaaagctatggcttcttcctcatgtaattgtgccaaaccccagatttcccatcctctttcctctgcctcctcctcaacggtacatttgggccactctccaacatccatctcctggaacagtcggcagcccaacagaacccacaatatcagcatcattcactctgctttgcactctccttcagtcctccatttcccaaaacaaccctaccaaaaccccttaatccccatagaagacgactctgtaaatgtacaagtacaacctaaaacccaccgccacccacagtggaacctcctccaaagagctgcagccatggcacttgacatggctgaaagcgccttggtctcacttgagcttcaacatccacttcctaaaaccgcagacccacatgtgcaaatctccggaaacttcgctcccgtccctgaacagcccgtcaagcaagcccttcctgtcaccggcactatcccttcttgcatcaatggcgtgtatctccgcaatggagccaaccctttgttcgagcccgttgcaggtcaccacttcttcgatggtgacggcatggtacacgccgttaccattgataatggcaacgccagatg

SEQ ID NO: 13268 - DNA, 613 bp, Gossypium hirsutum
tgcaaagcagacctaaaatttgcagcccaaacttgtaagctttcaatctgcaacatataaatagccagataacctcaagatgtataatcctataagtagcaatgctacttattgaaattgcaaatgccttaagaaccaggcagtgagcaactcaattccaaaagctttctcctagtcatatctagaggtacatgaacaatttttagttatcaacagtggtgaaaattttccagaatatagtcctcgccaattatgtagataagtctccattaacatggaacaagaagatgaatgaggtctaagttcaaacaccacaccgaagttgattactatataattaacaaatgacaagaactttaaacaatattggtgaaccgctaataagaacaaccaaaaatgttagacaaaatagacttccatgagttatgacaggttattaatgagaaatttgtgtgttcattagctctgcaactaagattgacgatctaaagcttcaacaaccactaaactcccaaaacaaatcaggaaactacattttaagatagcaataatgcccaaactgctttagacataggggaagaagcaaaggaagtgaaaatgaatgcaattagta

SEQ ID NO: 13269 - DNA, 656 bp, Gossypium hirsutum
ctgtcatttcattccacacctttgaagtggtagacttttgacgtttgagagcactttcatactcattaaacccatcgtccacaggtataggagtgttcgaacaagccatagtcataaaaactcaagtcctgaaatccaaataaaccaaaaaaaagttaattttcatactaaaaaaatataataattattatacgatttgtcttcactgtaggaaatattggttttataattttttctcattcaacaaaataaattttatttgagggtttaccattattgtttggaagacatggtagttggtttcttatgaaggattcaaaagaaaggtaaacaaaatggaacatatatagacttggctttgattagatgtcaatcatgaataacaaaaataaaaagcactcacactttgttgctaaaatgggtgccacctcgagataaaagccttaaggctccacaactatgacatggacaagtttctggacaatttataattgagaccaaatggcttcatcttatttaaagatctttgaaaagattatatacatataaagattagatgttggaataatctacagaatcctctcgatgtgttgtttaagcttgttcaagtgtactattctttttgttttatactagccaataccatttcacttgtg

SEQ ID NO: 13270 - DNA, 620 bp, Gossypium hirsutum
  misc_feature (610)..(611): n is a, c, g, or t
ctctacacccatctttcattgaccgaaaacaaacataataggtttcagaaacagaaaatttcatatccaatttctatatagattttattgacgacaataaaaagcttttgagcccgaagattagctcaataggttcatgcactcatccttaagaggcagtactaggtaggtataggattcaaattccagttttgaaccctgaatattagttcagttagttcatgcaaccatccttcggagggtaacactaagccagcaccggattcaaattccggcctctacgatccctttccggatacccaacccccaacatcctttatgctatgtacacacacacacacacacacacacacacacacatatatgcatatattaagcttttctataatggtgggattggatataaattcgtttaatatgaaccctctggtgaaaaaacataaacaagtttcttaatccaaaacataaaatcattcgaacccagaaccgaaaacctactccaagcaagtttctaactctcaatataagcattgaattaattggaaaacaaaaatatcaattcataaacagcaaaacacgaaaattagaagaaaccaaatgaatataaacnnaaaaaatga

SEQ ID NO: 13271 - DNA, 689 bp, Gossypium hirsutum
catcaaatgcaaacacactcaaattcacattgtttttcaaatattatataatttaaaactattttatttttaaatataatagttgaattatgtttactgtatggagtaaatatgttgggttggttttagttggcttaatgagttttgcttttcccaaaagaaatattttttgaaataatattcattttatttgtttataatctaatttgtgttttcgtgattgagatagacacatataccatgaatttaataaaacagaaaaaaaatatctataaactattaatacattcaaaataatattaaaacaaaaaatatattaaaaaaaattcaattttacacttattttataatacacatttttaagtgtttcaatccacttttgttttctttttctatttatatatgattatctgaatttgtaaaaatggttagagaaaacaatgcatgtaatgtttttgattttaaggattattgttgtttattttttttatgaatattaaaatttaaagcaacagaattatcaatccactcttttgtctcaattatcaaatttcttttaaaatactaataattattaattataattttaaatttatattgtaggtaaatccttttatgtgtaaaaaatttggataaattaaatatataaaaaaagaagtataatgacattacgaagctaatcaatgctg

SEQ ID NO: 13272 - DNA, 682 bp, Gossypium hirsutum
cgaaacatggtaactctaatgacatgtcatttgtatcctatatattcctaaggttcaaacggggctcgatagttatcgtaacgtcattggatctttttcttgacatgatatgatgaataacataatagcatttaaatcaaatacattaaaatgttatttaaacatatgaacttacctcaattataaacacgtcgaagtaggatcattaatccgagactttatcttttccttgatctagatctgtacaaggcttaacttaatctaaataagtaaattcaattaattctatattcattcaattcaattcaattcaaaatacataattttgaaaatttacacatttacccctaacattttaacttctttacaatttagtccttaagccagtaaattaaaattcttgcaatttcatcaccatactaagctagttgaattctatataagcccatagcaactcataaaaattattagttcacattttcaccatgtatttgaacacattttacaaataagtctttaattgacattttcaacaaaaatcactttacaaaagttgtttatttataattaaatattcattttattccatcaaacataaaaaatctcatgcacacattcattgaaaaaccctaaccttttaaaaattttgcaaattagtccttgggctagatggattaagcta

SEQ ID NO: 13273 - DNA, 505 bp, Gossypium hirsutum
aattttccatatgcgcctagggcatatgagtgagaatggcatggcagaattgagcaaaagaggacttcttgatgggcaaggaatttgcaaactaaagttctgtgagcactgtatttttgggaagaaaaagagagttcgattcaccagagggatccataacacgaagagaatgttggagtatattcattctgatctatgggggccatccaaagtgtgacagccctaaattgaccctagtcaaaaagtggtttcgggaccgctaaaccgagtcaccgaagtatttgagtataatatttattgtctaaaatatgtgaatatgagtgtgtgaaagttttaagcttcgatttagttaattgcatgtgaatttagttaataggacttatgtgtgacacttttgaaatgtgataggttaatctataaggacctattaatgcatgttataaaaatgaggagtttgcatgtcaaatttccatttataataggtagtggccggccatggtatggg

SEQ ID NO: 13274 - DNA, 634 bp, Gossypium hirsutum
cggcaatgaagtctagtgctgccagctacaaatgaaaggtcataatatgtcattgcaattgcaccaagtatgatggtaaccaacattgataagagcatagaaaaccatttgtcctaatcttactagtcttagagatgctatataaaaagtattaatctaattatttccaaatatctaacttggttatttcatagtctatatcactgacaggagactgcatgaaaacaacctggaaacaagcagtagcagcttgggcatggtgaaaagagctaatgccaaagtaattttgaaagctcaaatcttggtaaagaccaacaactcatcaatgcaacaatcacaaaacctacacttttcatcaaacaagaagtggatatgccgcattgttacctgagatgagaaattcttgaatggttcaagttcggcggatgaaagcaaattctctttcgtaactaaattaggatacaagcttgtcaaagcagctaatcttgatgtccctccatatatttgtgcccctgcgacatatatttgagtcttacgattgaaacctagagcagcaagcataagtacagcttcttctggtgttaatggacataacccttcagatcggagcatggcaggggaaggtaacctgaag

SEQ ID NO: 13275 - DNA, 651 bp, Gossypium hirsutum
ctgacgtggctgataggataatcagacagttagatatggcatgccacatgtgcttcattctgatgtacaatgaccagttattaatagtagaaatggatgaaatttttaacagaatctatttgctccttggtctaatgtacagggattaatttgctcatttttttagtaaagggggcaaaatgcaatccgattattagtacaagggcctccatagtactttttccgagattttcatcaaaatgttaaattattgaatcactcgattaagtttccatacctaacatgcaataatttagcatatctaatgacaaaactatgctagttgcataaatagattatgtttttcaagtcattcactcaaatgaaggaacagacaaccaaggaggcatggaatcgaaaatactaaccttattgaggtaaattaattgtgtaatgacacagataacagcaactgtaagaaaaaaccaagtttgaggataagcaatctgactcatcccatccaatgtaagctttatagcaattccaatggctttgatgctaacaacctgtgacaccacccgagaaacattgtgcttacagcatagtttgccaagaaaagttcaaaagttagatgtacataccgtaagagaacccatcaatgaacatattccc

SEQ ID NO: 13276 - DNA, 566 bp, Gossypium hirsutum
  misc_feature (332)..(332): n is a, c, g, or t
  misc_feature (518)..(518): n is a, c, g, or t
tataaattgtacaaaaatgattataagataaaatttatatgcttagactccttaatgagtctagtttcaaatgaaatcaaatacaacacattttgaattctgtacaatgagaaatttgattcgtagtgaagagtggtcagattagtcaaacagtgaaacaggggaaactttaagaaaaatctggtattgattggccaagcctaaaattctgaaaattttatggatggaagatatacgagtctatattcaggaaaaattaacggcaagtgatttggagttttgtagctccagttataaataatttagtgactgctgctcaggaaaacagcttntagggaaattgtgattttgttgtaaacattaatgaaaatttgctaatgaattatttattgatttttataaagcttactataatctatgtgtgtgaaagtcgaatcaatatatattatattctgaaagtaatacttgaatagtcgattaatgactattttaaaatttgttgaacttaagctcaagancaaaggggaactaaatccgataaagggaaggaaaaagtaatccaataa

SEQ ID NO: 13277 - DNA, 615 bp, Gossypium hirsutum
aaggtcatggggttccataactcaaccccggaactgaaatttatatgcagaagaaacctcgatgctgaccgtaaacatcgacaaaaacacggagaaggatttgcagcaagcagtggaagaagcagccaagttgattgcggaggaaaagcaggaagtgatagatttctcgagccatgtggacatgtggaccgaccccggtcactacgtgatattctgggaaataagtggggaagtaagcgatgaagtgctgaaagaatgctgcaattgtttggatcgttcatttgtggatgcagggtacgttagttcccggaaggtgaacgcgattggtccccttgagctccgagttcttaggaggggaacgtttcagaaggttttggatcattacttagggttaggggctgctgttagccagtttaaaacaccacgatgtgtagggcctactaactataaagtgttacagatcttgtgcgataatgttgctaagacctacttcagtactgctttctagctgttgttaaatatatttttcccattaaaactcgccatttttcttaatataataaaaaaatcaaaagttgttcattgggtgggaaggaggatcagatcaattaaatt

SEQ ID NO: 13278 - DNA, 770 bp, Gossypium hirsutum
  misc_feature (591)..(593): n is a, c, g, or t
gccttgttaaagatcactgtaaatccatcggctgatgcaggatcgttgacatcccattcaccgaatttcggcaatggtttaccctggtcctgttgaacaaaaagagaagtaaaatgcttccgtcaatatccttgtaaccaaagtaaggtagatagacaaaacatcaaggcaacaaaattaaagcctgtcaagattcacatctcgagttgcatgtcataacaatccaataaaaaattgtacagacaaaagagctccaagcatagaattatttgtccaaaatccaactaggaaagtcagacaacaaaactgttagctctaacaaattacttacctcgatgattccaaactttaataaagggaaaaaccaggatattacaaacaactcttcattgttttccatataggttaccgtacttattagcataaccatggaagatatttttcactttctaggtctttatagaattatggtttcttcaaatagaacaagagtagatctattctgttccgaactagcaagcaaccacacgcaacttatctctaaatgccaacaaagctcctaaatgatagctgctagataccgtacagctnnnaatcaatttgggagctttgttggcatttagagataagttgcgtgtgattgcttgctagttcggaacagaatagatctactcttgttctatttgaagaaaccataattctataaagacctagaaagtgaaaaatatcttccatggttatgctaataagtacggtgacctatatggaaa

SEQ ID NO: 13279 - DNA, 653 bp, Gossypium hirsutum
tgcatttaagaggattggtactcggcctcccacaggggtgttgatgtttggacctccaggttgtagcaaaaccctcatggctcgtgctgtggcttctgaggctggattgaattttctagcggtgaagggtccagaacttttcagcaaatggattggtgagtctgagaaggcagtaagatccctttttgcaaaggcaagggctaatgctccgtcaatcattttttttgatgaaattgatagccttgctgtaactcgtgggaaggataatgatggggtttcggtttctgacagggtcatgagtcaacttcttgttgagttggatggttagtattagatgctaagcattatttctctcatatatttatggtgctttcattcacatatatatattttctcatatgggatatcaatgctctgtagttttcttcttgtagtatactgactggattaaaattctcgccattctaggtttgcatcaaagagttgatgttactgttattgcagccactaatcgaccagacaagattgaccctgcccttctaagaccaggtcctttctttctctctccttccctgccactgttgatgcacaggagagtgcagccaacattacaactttctagtccttgtatggcatgaacatgtttaccttct

SEQ ID NO: 13280 - DNA, 649 bp, Gossypium hirsutum
aggaggagaggaatgatgtgattcaggttcaaattgactgagttaactggttgcgtccggatgaggctaagtgggttttcgttggtttggggctgtgggtcttgtacgtatttagttttgataataagggcttggaatataatacgagtaatgttaatgtagaactttcattttgtgttaacagaaaaccttgttaattttggatctagatttttgctctgcttgcacattgaaaaggacttgaaattagtgaccagatgatgaacaagttctaatttgtttaatgctcgtcaaccattgaactttctccctgtatgacactttcattcgaacttgcggaggtgcaatgcttttccccaattcgcttttttatccgtcttctgcgacggtaccctttaagctttgaacgtgtgaaagtgactgtgagctgtaccgattccaatgttatagcaggcgtcctcaaattgtttaacaacgttaaaacgatacatttaagtgcctgaactttgacggagaaatttgtcacatgacgggagcgtcaaaaaaatagaaaagataaaattagaattatgaagaagctgaaacttttattgataaaatctacaaccagtacaagcaaatgtagacattgctttgctacctgaaatta

SEQ ID NO: 13281 - DNA, 601 bp, Gossypium hirsutum
  misc_feature (572)..(572): n is a, c, g, or t
atccaagaccaaaggactaaagaaatactttccatcaaacaaccaggaaagatgagatttttttttccctgcaataccttgatctctctaaatgggatcagaagagacttttcaagcttagagtccaagccaagtaggcgagaggccaggcggaaattgcggctagttccagcaagagcattcatggctaccaattaaaacctcaaaacgagaaatacccagaagtgggactgatcgaaagatgaagagaaacaacagtatgaagcataaaacaaggaactgtaagagaaacaagttgatcaatgaaagaagagacttttttttcttgggtgctaaaaaagaacgtttctttaaaggaagagaaggggcatatcatatacttcgggaagttcctttaagagagagtaaaatgaagaaagaaaaaagagaatgggaacaagcgactgttaggaggcgtgaattgagcggaggaaaatcaaagaattttaagaacgagtattggttcctatatttaactaactttaatttgggatattttgcattaaaagctttactatacgaaacccactttntctttgtttttcatatatattggataaaa

SEQ ID NO: 13282 - DNA, 643 bp, Gossypium hirsutum
tcaccatcctttaccatctccctttttttattttttgttttcctctttcttttcatactgatactttgaatttaaatttccaatttcttcatttcttttggtacaacataaactttgaacattagtaagcggacttcaattctagtgtaaactatcaaccgtcaataatgattgtttaatatttttttccggccaacccctcacatagtgcggtgagtttttagaataatcagttgatcaatttcacctctacctgtcttagttatgcagtcagcaaactttattgacattttgctgaatgtgtctaaatttgacttcccaagttttggagcatcaatcatgtatcttcctgattttatcaacactacttactggtgtcagaccactccaaatagtctcaatcaacattgtgttgtcactttccaattcaactcgcttgaatcctttattccaagccaatttcaatccttcaaggatcgctctggcttcaatttgaaagatatcattcatacctattaccattttgaaacctaccaaccatcctccaataggccctctcattgcccctcctacagataccttcgagttacttcttgacattgatccatcagcattgactttaacccaatctatctccggtagg

SEQ ID NO: 13283 - DNA, 469 bp, Gossypium hirsutum
atttgccattagtcacactcagttcagtttccactgctctttaccctttcatttgagactatgaacgaaagattttttttatgtagcgatagtaaaatggttccctttcttggcctgagtgacacagcaattctttgtgcttgcgtagttgtttatataacaaacttcagtgattatagctcctgaccaagctcaagtttgcaacccagtttgtgtttctagtgctaattgtgcatggactacgaatatgaactagatttgatttctttgttttgtttggttaatgagatttgtgattctcattgttgactccagggaggttaccttttaatccatagccaattcttcgcaaaacaggggaatgcatctcagtagttatatatgcaattgatgatagtgtatgacgttttgctgttgtcagctttgtgctggttataacatagaatcctaccttgttgtgtatcctctg

SEQ ID NO: 13284 - DNA, 613 bp, Gossypium hirsutum
gcacatgttgtctaccattaacaccatggccggccactacacataaaatggggagtttgacatgcaaatcctcctattttgcactactatttattaggccactacatattagcctatagcattttcaaaaattttcacataggtcctatttcataatttcactcacaaatggcagaatcaaagcatgggattttcacacatgcactttcacatgaaataaacacataatataacatttgattatttttgggactcggttttgtgatccagaaaccactttccgactagggccaaattagggctgtcacatgctatgaacaagggtcacacgcccgtgtggtttaggacacgcccgtgtgggcaggccgtgtggttacacacgcccgtgtccctaacccgtgtaactctctattttgtaaagcatgaaaaaatgaaagtcacatgaccaagtcacacgcccatatgctaggctatgtggttaatttaatttttcataaaataggtgcagacttcacacggtcgagacacacacctgtgcttgaggccgtttccttcacacagctgagacagatgctcgtgtctctgcccatgtgctcatttctgaccattcagt

SEQ ID NO: 13285 - DNA, 377 bp, Gossypium hirsutum
tattctaaaactcaatctagtaaaattgtataatcaacaacaagggaatcgatgaatgagaagaccatgaattagaatacatataaatcatattaaaactaaaactcttaaatcttgaggttcgctgatttgggttactgttcggagtacgtattttaatatgatgtttgatgttaaaagacaaaatgattagcataatgcataatgtctcttaagaccgtaaatcacacaaaagattgtgagtctccagttacctccttaatcatagccattaatgtaaaaaaaaaaaaaaaaaaaaaccctttttttttttttttttttaaaataaaaaaaaataaattaattttttttcaaaaaaaaaaaaattttttgggaaa

SEQ ID NO: 13286 - DNA, 683 bp, Gossypium hirsutum
  misc_feature (677)..(677): n is a, c, g, or t
ttagcccataaggaaagcatcatggtgcagccttaagttcaatgagatgaaagtgtaatattatgcaaccgttataactagaatttctaaattctcattctttggtaagaaggtagaaaagggaaataagaaaagaaaagaaaagaaaatctttgagagtggaatctgcagggctgaatcatccattaactgaccatatgcgcttatttttgttgataccttggctgttgttcttgcattggtttttttggctgtagtgccttcaaattagaatactgtgtgtaaatatttaggctttgactcttgtgattgagttattcattttggctttaacatatgctcttcctagtactggtatggagtataaatagatgtgaagcgaaatcaaaaagagatattgctacctgtccatcctacattcatattggctctcctatcccctgcatgaatatatttgcttcctcttaatttaatgacgtggttacttttgatattttcaaaactgcagaccccttcccttgcatcaccgtcacatggctgttgctagcatacaggtattctccctcttgtatcccgaaaccaacttatcatccccattgtttattctgacccatgtttcaacctgcctcgtgcagttacagaaggttgtgaaattactggattcagtatctgttaanggacat

SEQ ID NO: 13287 - DNA, 616 bp, Gossypium hirsutum
  misc_feature (555)..(555): n is a, c, g, or t
tgttggaaatccccttacacggtaatttgttacaacagcaatccgttagtggattaacggaattttaaatagcagtaactagtttgaacaataatattaattagaatgagtaaattgataaaaaaaaataagagtggccttgggtgtggtttatacttatacttttatgtgtgtctaaatttactaatttttttgagagaaaaaaaatatattaatgagaaagtcacaaaataatagcaaacacaaagaagagacagactacaaaacccgagccaacaagctcaccccatacacccaaacctaccgtgtgcaatcctcatctgtatgaacataagatataatttcaaccttcttcaaagaaagatgcaaggggaaaaacatcctactccttgtgaattgcatataacaaagcagcttacgcaagcgagtgggccaccttgttggcacacccatgagtcccaaaaaagtacaaacgctaaaactaatctttcagcacccaacaatctagctcagatgcatcaattatacatgcttttttcctatcaaactacgtanccatagtagcccaaaacacatacaatttaccatagatctggtccaacttcgatagtatgca

SEQ ID NO: 13288 - DNA, 620 bp, Gossypium hirsutum
cctgtatttgagaatccaaacctcctatatcagcataggattccaatggagccttttcaaccttcatcactgataccatgggatcaacttcatcttgcagaagcccaacaacagaaagaacctaggaatatacaataagcaagcataaatttctttcgaagaacaaaagaatgagatggaacataatgaagatgccaacaatcgatagaaagaatagatgcaaaatctttaaatggaagaagtttcctatctaccctttcaagatttatactagcattttggattagcaaaagtgtgatacaagtagaaatatgcccaaagacttgaatatcatcaactttaatagcaaacttgataagcaaataccccatctagagcttgcttattcaaatctggtatcacgcctcgctcgcatttatttgaggtaacctctagcttgagatctacagaatggctcgaacttgtttatgaatttagctttgattaaaagttcatatttcaaagctcatcaatctaagctaaagtaagaaatcatggtcaaaacacaattatttattcaaatttcacaagaattctctcacgtatgataatttagcaaccactagtttgacataacatca

SEQ ID NO: 13289 - DNA, 593 bp, Gossypium hirsutum
aatgcttgatgctcaaggcggcgacttggtgatgacgtttttgtcttgatcatgccaatcacatcatgtattttctgtatgcgaagtttacttagttttgacaaaaatactcgagacaagctcgacgttaatttgttagcaacatttggggcggtgtctgtagggtcttcctttcttgtaccactgttctcttgacctgaacttccattatttgttgcctcagtttgttgttgtgaccctcctactgttgcctcattacttcgaaggctattattctttttgctatttgtttcttcctcttcataagggcttttctgtaaacaccattacaaagaagtacataatctcaacccccaaacaaccatgttgaaataacaattaatgtagaattggttttctttaccttcacatttgtaaggtcaacattgtgctcccgaagaaatgatatgaactcctgaaaattctcttctgttgggaggtagtgtccactatggggccaaatcgcctataaagttgaaacaacatttcagtgcatcaaaagtcttgtacaaatttgaaaatgacaaagtgtaactgaccttcacgacaacgta

SEQ ID NO: 13290 - DNA, 604 bp, Gossypium hirsutum
tattgatatgttgatcccttctggaagatcaagagatatcttaacatcggatcgaagctgcattaaagagaaatataaaagtggttgataattttgtgtataagctgatccataacaagattgagcaactacgcgactccaaggacgattcggctgtagtaagtaaaaaatagagctacttgagctttttatatgaagagttgaagtagaattctgaactgatctgtatttctatgggattctgcagataaaaaaggaagacattttaactagattcctcgaagtgactgacactgaccccaaatacttgcgagatataattcttaacttcataattgctggcaaagacacaacagcagcctctctgtcgtggtttatatacatgctgtgcaaacatcctgatgttcaagaaaaggttgctgcagaagtgaaggaagcaactaaatcgatggaggttaaagatgttgctgtattcgctgctggcctgagcgaagaagctttaggaaaaatgcactatcttcatgcggctataactgaaactttaaggctctacccagccgttcctgtggtaaggaaattccatttgccataaagcttggataca

SEQ ID NO: 13291 - DNA, 401 bp, Gossypium hirsutum
ctgccctatcagccatcattaatttgccttatggaagacaatttacattgtatcaagaactttgttatatggagtttcacatttgaacttgtagagcaaacattttaaatgccacttgttttaacaggagaattcattgctcccttccaagccaatggccttgaagcacctcaacggcctgttcattggttatgacgataagtctatgaaaaataaatatatttattataatttaaatatttaaaaaatgttgttaagttgtttatgttaaagaatttaataaaagaaaatgtataccgtgataataaaatatttatataattactatataataaaaaaataattacgttttttaaaataaaaaataatatatgtgcacctgaagtatgattgggttaaca

SEQ ID NO: 13292 - DNA, 468 bp, Gossypium hirsutum
gaatttgttgataaccaggatgttttggatttgatagagaaggtctgaaattgttgcttgcttatctcttcttcattcatatgagctaatcttttgaagaatatgatatgttttggttcctcctaaataatccttccccgcctggcctggggcctggtgcataattaccaacccttggttccatctttccggcaaaacccggaagaataattgcccctcctgaagaaacttgggaaggctccaataattttccttaatttaaaattaatttttttcgaataaaggaacccaagaactaatattggtggggaacttaaaatggttccggggccctggctattaaggttaattaaccaaaaaaaaaataatttccggatccatcatccacccgccctccggtgctacgttctgattttttcatgtttacttgactgcttgatggcttatggttccaagttcccaacaacc

SEQ ID NO: 13293 - DNA, 658 bp, Gossypium hirsutum
tccattccggctattaggcattaggctataaatagttactcattttcttgtaaaaggacttttgacaaatttctgaatgaaatatcattttagtgaggcaattcactctctttattctccaaagctcaaattgacttatcttcaacaagtggcgccaatctgactttgtttcgaacttatcaccattggtgtggcgttcttcataccgtaggttcctattttgctaaatagagggtctcggttttatcccaaaatcctttctttctttgaaaccttaagccccgggtccttatttgctaataagggttcgacttgttttcattgaaatatccagcaaacaacactccatcaaactccctcgttttccaaagccatttaattttaaacaccaagacttgaatttatttcaaggccgacactacctaatttcgatcgagaaatattacgactcgttatttcatacgaaacgagctcgtatcagttcaaaaaggtcaagagtgaaaccaacactaaagaaaagtgtcgacccgaaacttataggaccaaattgagttggaaatggttgataaggaccttgacccgatacttagtaaagtatgaaccaaaggtatcaaaggtgaacgccacactcgggtttagggagtgataagttcgaaag

SEQ ID NO: 13294 - DNA, 689 bp, Gossypium hirsutum
ttttcagcacagatgtaccactgccggttccgaggttataggcaatacagcctagaacaacatatgagtttaatacaaacagtatatttgccgaacggtacaataaatgaacttaaattaatgatatgtaaaaacttgaatgaaacaaattgatcacctatattctcagaggaaaaaagcttcctaactgcagcaatatgaccatcagctaagtccataacatggatgtaatctcgaacctgtcaataaatgagcaatctcttttaggcgaaagttaatttatatgcacacatggaacagatatagttgataatgtcgattgcaatcaacaaacaaaaacttctaatcctacaaaaatttgttctttcttcaagaagcaactttagcttttaaaatacataccgcactgccgtccttagttggataatcatgaccaaatacattaagttcaggcaatctgccgacagctacttgctgtatgtaaggcatgagattgttggggataccctttggatcttcgccgattttaccactctcatgagcacccacaggattgaagtaccgcagtaaaataatactccaatctggttctgccttctgtatgtctcgtgcaatttcttctaggaaaagctggtaaagttttcagttaaaacaaagtttagcgattacagttcatgagaattgatccg

SEQ ID NO: 13295 - DNA, 650 bp, Gossypium hirsutum
gtgatctgattgttttggttcatcaaaatgaaaaaagtatttaatatttacatttcttcattaatttaaatataaaaccagaaaccaccaaaaccggacgggtaagagctggttggattttggaaaccccttctttcttttatatatatatttatcttctccattaatccatctccgttggattcaggagaatcttttgtacgccataatcgaagctctatctctcgagtcttcaatcatgagtttcttcaaaagctaattcacgttattcttatttcattcatttatttttcttctttgaatccgctctctgaggagagaaaagagaggggagggaaatgacatcggggttctccgggggtggcacagagttttacggtagaatagcaggcggatccgtctctaacagtggcaccatgagcaacaaccaacccactgcaccgtacgggacacatggaatcttcatggaccctaagtctcaaatcgtgaacagggccgcacccggtttcgtcgggaagcgaacacgagctgacttcaataaccacggcctcaatgatcttaatccccgtccagttaagcccagaaattaccagcacgcttatccgatttctcccttatcgcctatagatttctcgagcaacatattaccg

SEQ ID NO: 13296 - DNA, 636 bp, Gossypium hirsutum
tacgttgcttcctagttcttaagctagggaggaatgattgcaatagaccttattcatagagcccttccttgcctctagtgaaaggacccctaattcctatccccacgagttacgagctccgagatccctttaaaagccaacctttctgctcagtaaacttcgttctagctttcttatccctctagttttcgaggcaagattcggagcccacaagttaaggcgctaatcttcttctgaccgtacatcccttggatagaagggatcaaactcaactcttccttttagtaaggaaatgtgtctatccaactcgtacttcgcaacctagatctttgtatgtatgggtctcggtaatttaagagactagatcaaatagggcaattcgtaatgctctcttccttcctgtcctaaataaggtcagtctcatcggcaggcattcttcttagttctgaggtatctaatgctgtctttccagattgattcttatataagaagtataaataattgttgctactacggttaagaagactcttattatgttatggacagtccaggaacgagaccttcacctaaccctcagaaggttggctcgttgttaacaagcaaatgcgaaggaaaaggcttaaatctcacatttcg

SEQ ID NO: 13297 - DNA, 371 bp, Gossypium hirsutum
attatttattttattttttaaaattttcttacaaaattcccagaaaattctcaactttttttttctctcctaattttattttcttttactggaaaattggagcccccaccatccaccctcacaaactgtgaaattgttgtgtgtgttttttttcctttttttttctaaattttctttcaattatttttgttctattatggtgataataaaatttgccattttttaggcgtttaatcatgggaaatttaggggaggggtccacataaaaagtatggattaatttttaattaattgttgattaagtaattggcgggaaggattaagcgaactaaaatgaaaggaaaggttttgtgggccccacactttgcggc

SEQ ID NO: 13298 - DNA, 576 bp, Gossypium hirsutum
tttgaatgaccgacaactattcaagacctgcaaaagttttacttgcaataagcaaccactacatcgccattgagaggattcctacaagtttgcatgcaactttgcaacaagtattcattttacaagtaagcaaagtgaactaacattatgaatttctcttaaatatcaagtaagcaactttacactccttaagcatataacttgaagtcactatacttgtggagtaacaattgtgaaatttaattcaatagttttgcacaattataccattttgcctttatgtggacattcaactacttgtctttaaaaaaacagtagagtgaagaagaattagtgcatgaatgaactaaatccaacaaaaagttattgttcagaaaagcaaagcatgccctgacaagtaattttcaattgccaagccaatagacagaccaaaggcatatagaagaaactcctcaatcatcgtcaataattacaagatgctttcgctgtaaaagaaagcattaatcataaacctgtcattcaaaactcgatacagtgatctgatcaaccatttttggcacccaatatgatcaaaag

SEQ ID NO: 13299 - DNA, 410 bp, Gossypium hirsutum
  misc_feature (42)..(44): n is a, c, g, or t
  misc_feature (71)..(74): n is a, c, g, or t
tttgtgcgagactttagtgcttgctgaattgttcaattcccnnngatgaacaaagacaatggtaccacacnnnnttgtcatcatttcataaagagtgtgtgatgagtagtgcaataaatgaaaatcataacttgtcagattaacatccgtgagcactccaaaaaaggaatgaattgaaaggatatcaatagctaactgagaaaattttcattagagtacacgagatttcattagactagcttgtcaaatgactgaatgaagaatcaataaacagaataaattcctaattttgagccaaaaaaggatatcaatagctaactgtgaaacatttcataactactgcctcataagatcccattgagattaactttaactctaagctatcacatggatattgcttaaaaagtgaa

SEQ ID NO: 13300 - DNA, 651 bp, Gossypium hirsutum
tccaccagttatcagtgccaccttagcatctagcctgtatcaaataaagcagaaacaaggtttagattctattctataggtgaaagtacttgtaagttactttattaaacgactatatcaaattagtacttctattattaaataaatcaatttaatctatgtgttattatttgattcttttttataataaagaggctaatttgattcatttaatatagttggattaatttgatccactttctataataggacttacatatcaaggtttttattttattttatcttgacaaaaatacactattgtttttttttcgggtgaattataataatagggcaacgtccgaacaatgattagcatgacttgaactcaagcaacacttggggcggtggacactcttgactatcagaccatcacataaagttcatacaatattaattttaatgttttctactgaattcaattaaatccgtcaaaattttgacccaaacctaaaagttttttttgaataactcgaccaaatcaaatttgctcataaaatgtcaacaacatctagaacaaaaattaccctgaatgaaaattattcaaacatgaaaagactcaaaattaaaatggtataaataattaacctgatatgatttaaacccgtgatg

SEQ ID NO: 13301 - DNA, 632 bp, Gossypium hirsutum
gagaggtatggtttcctaatcttatgcttaaatttgctaatacaagttgcaaatatattgagaaacaacgatatttgagtaaataattgttgtttgtagagatcagagatttaaattgctgcaatcgttacggttaacttatagaaatctttggttcatcttattttttaattgatttaataatttaaaagtgttaagttccaaattacacatgaatttgattcgtgttgcagcgtgatagagatactttgatttggtattattatatatataactttagtttttactttatacataaaactttaattatgagctttacacaattaaggaaaaacaaataaatgcatttcttcttaattacatatatttgtttttaataaacttaaaatgatgtcacattaattacaatgtcaataacttataaaaaattcaattaaaattaaaattttaaaatcaaaatatatataattgcacaaaaattaattttatgtttctcattagacattgtgtttatgtataaggtggatatttatcttatttaaaataattattcaattttgtaccaaaaagaacaaaaattaattaaaaattgtaagcggggccgagctggttcagggtagataataattccg

SEQ ID NO: 13302 - DNA, 646 bp, Gossypium hirsutum
tgaaactttctgtctcttccacggatttttgtttaactctcatttctagacgttctcgacattatgctgggacaaggttagatgctaggacaaacaagaggttcattcactctctcttggtatctcctcctcttatgttatgcagaaatgcatcagaaaatgataaagtttaaactagagacttgctttttcttttctcttattttatttaaactgtaaattcgtattcttagcaagcaacttgagtttcagattatttcaataattcacctttttcttcttattgcaatatttgacatctattgagtttgtttcctttaacttttattttctcattgaattatttgatttatccattaaattagtcgagaaattatgatcaaatgaggcaaattagtctcagaataagaataaaataaatccgttgagatcttattactttagaaaatagaaaaggtgtttacataagccaaaactaaccaaaccaatagtagcttttattggggatttgttttaactcaatttggagtcaaaatttgaactgttgaatgttgtgcttccatttcaggttagcttgagtgcctttgcatttttgttctctgagcttgttcagtacaatcaaactcgggttgacaacattgctgaa

SEQ ID NO: 13303 - DNA, 628 bp, Gossypium hirsutum
tattggttgttggaagacttgctgctggagcttgtgctggcatgacatctacttttgtaagtcatataatgtcttgggaattttctggtgaaacttcttctgcatttcaaatttgtatatgaccacttaactttggttgttggagttcttcatttttgtctcttgaatcttgatttttctttttgattactctatgtcaatacttttggttgtttattttttatatagataacatatccattagatgtcctcagactacgcttagctgtggaaccagggtaccggaaaatgtctgaggtattcctaatgctttcattgctactaacatgaagacgaccattttattggaagatggaactttaatgtgctgcttccaggttgctttgaccatgttgcgagaggaaggttttgcatccttttattatggtcttggaccttctctcattggcatagctccatatattgctgtgaacttttgcatatttgacctgtgagtccaaatgatactgctttaggtaacatatcatatgagagctcaatctttaatctgtcttataaaatctgatgttgttaacagcgtgaagagggctttgccaaaaaaatatcgtcagaagactcaagcaaatca

SEQ ID NO: 13304 - DNA, 576 bp, Gossypium hirsutum
  misc_feature (329)..(329): n is a, c, g, or t
  misc_feature (332)..(332): n is a, c, g, or t
ccgcaattttagttacaccagtaaaaagttcaaagttacaggtagagattaccctgataccctctaatttctttataagccttggtgtatattcactgaaaaaattataaatatgtaaacttaaaaatctttactgtgagaaaacagaaagctcaagatgaaatgaaaatagaaactcataataaaaaataaacaaagaactattaaaaataatctgatttataaaaggaagagtaaaacaaacaaatatgaaagtgaaagaagggaaaggacattatatatgaggaggatatatatgcaaaggatttttttttttttcatttgtgtgngtnaaatcagtttaatcaaccgcgcactatattgatatgagttgatcaaatggaatgggtataaagagatgacactgatcacaagaaccaaataaatgagacaaaaattttcatcatcaatgtagcaacatattgcagtatcattcttccatccaagaagaagaaaagtctaaatgtagcaacatataaaattgaagagccaaatattgaggtacgaatcagcagattatgacactcagcaagagat

SEQ ID NO: 13305 - DNA, 678 bp, Gossypium hirsutum
tcatggtttggcatttactggaatcatgaaaaacatgaagaaaaccaccgggccacagcacgcctaacagcatgggattaaagttggaactattcatccgtgaccatgttagccagaaaacaaagatatggagatttcagaaaaatgcatggacgacctgaaagcaagagtccatacaaaagccaaaaaaagtgaggaccccattgggattaaaacccatttttagcaaaaatccaccaaaatgtggtctgctgcactgatggctgatcggttcataatttcttcttgaatcagacaaaggttcgtgagaccccttcgttttccgaagaggcaaacaggcacgtgagaccggacccaaaagaagttacggcaaacctattcctgccttcctaagggcctcctaccatttttgcacaaatttaggccacaaaaaccatttccttttgatagatataaagcaataacttttctgtcaacctttttttatcatgtttgacactataccagtctttctagaataaccaaacaacttttttattgaaaaattatactaatacacaaccgttttaaagaaaagatgagttgggttttttcggttcaagataatagtgttaggctacttgccgaaaataatcattcagcccaacagggcaccacctctcaaatgtacataaaaaa

SEQ ID NO: 13306 - DNA, 699 bp, Gossypium hirsutum
cattgtttgggtcctgtgatgttaaatttcccatcagacttgaaggccttgcatactcccatggtgctttttcaagtgtaagtggcaatcatttttatgggtttggctcccatccattacttctatgaccattattatctactacttttgtgccctgcacatttaaatggtgatgattagtgtattggagaggaccctaatcccattttcactgagtcttatgcttactataagaacagtggaaatgcatgtcttgcatgtggcgttttgggttctcatttatgagtggcccaattgcctctgcccttatccatgtgtgtatgccttggattttccccctgtgaattccttgaatttcagccttatgttataagttgaagctgagctttcatttggttactgaacagccttgaaatgatgaagataagttttggtctccaattcttagatttttagttcttttcctgtatgagttcgagattattaaatggttttgcttatttgatgttaagacttgtttgtttgggtcaatgattgggacttaatttttatgctgttttaatgcacagtatgaaccagaactgtttccaggtctgatttatcgaatgaaacaaccgaagattgtgcttcttatttttgtgtcagggaagattgtgatcactggagcgaaggtgattatgttctggctgctgttcttct

SEQ ID NO: 13307 - DNA, 671 bp, Gossypium hirsutum
tatatgcttctttccactgtggcttcccatccataggggggcgagttagctcgatggccaaaggcctcagagtctcgtctgggtttaagaaaaatagtgtgcgtgatccatataatgttgtccctggaagctgtctaactttcttcacatatggtaaaaacaggtcatggtaatctaggacaaacaactttttttgcttcaatgcctacacatgaagaacataattaattaaaaaagtttgtttcgtgtcaacatttgaatgagtacatggacaacttgggtacctcctccaatgaacagaaacctcggatttgttgctcgaccatctctttggtgattaccgattccggggggccgtagattgcaggatcaagtttgctcttcagtggccattcctatagggtttttttggaaactatcaaacctttgggccttaaaacaattccattctatttctttttgcatgccccataaagtatgcacaaatgcaattttaaccgagctgtgaaattatcatttaaccaatacttgcataactatatatatatttgagcaagcataattatataaattttatatcgggcatggaatgggtttttgcgcgcaaagttggaaccgtggatatggtaccaacaagcttaaaacttgcacaaatgatatgaaccgaagct

SEQ ID NO: 13308 - DNA, 498 bp, Gossypium hirsutum
gtgatgtcttgaaagatgaataggtccctatttttccaaatgcgccatgcaaccaaaccgaataaacaaggccaaattaccccttactaggtaattggacgtgataggcaatatttgaagtcaaccattccggaagagacctagagaagaaacattgttatttatcaaaagatattacctgtaaccaaacttcctttgttgtcgaacaatcttgaagcacatggagtatgtcttctgtttcatggctacaaacaagacgtgagatattatgatcagttcctcctagttcactccatattagacaaagtctttgcttgaaggctagtcaaagaaaaattttaactcgttgtggcccctggtattttcagctatgggttccaaaaactttttttttaaaatcaaaaggcgttatggacaaaaaaaaacctaaaatcgtgcgtgcccaaataatattgtttgtacccaaagaaggatggggaggaatacaaacaatatgtg

SEQ ID NO: 13309 - DNA, 400 bp, Gossypium hirsutum
gtttgagtgactactagtgcaatttacccttatttttgtcatttttgcatcctaagcacttgcatttttgttaaagtttcatttttgcattgcattctagacttccttttgatcgtatgcaataggattttgcagattcaaacaccgtctaagcatgattttacttaaaacctcgaacgaacgacgagaatcttgaattgttcattctcatccatgcaaacttttctgaaagaccactatagtgcattttaacaagggcatgttctaagaccagctaatatgcattcatctttttcctagcttaggttgttttattcatttcagtatagtgattcggtttgaattgttgatatattgtcgctatctacctgtgatagtgaagtggatcgtgctagtgttt

SEQ ID NO: 13310 - DNA, 686 bp, Gossypium hirsutum
cagcaaattccctagtatcagcaatcctttctgggaaaaccagtgatgcagccatggatttcggtggaaagttaggtgttttcgagaaggagatggatgctttagaaaagcaagtggatgccctgttttcgagtgtattggcagccagaaatgaactgcttaacggtgtttggcaacgcaagcaataacatcaaaatccccagtttcttatgtaaatagaagaaaaaataggcacatacacatttgtgtgacattttttttatatattgtatcttcaaaattattaatggaaatagaacagtttttcttgctaaagtccggaaatagaacaaaattttctgagtcaccaaatgaaacactgaactgcaacctcactatttcatgttggtaatgggaaattgcaatggaaagcaaaactaggaccatttagatacaaaaaggaaagcctatttgcgaatatcctcgctctttcacctaaagtgtatccattacctgaaaataaacatctataacttcactgtgtttacttctgtaatttggacaaatggttctttaaaaaactaccaaacgagagtcacttgtaacagatccatatcttggttttgtcatccccattagagaggcaaagggaacagcattaaggaaagaatcatattggcccctactggctctctgagtcattggaa

SEQ ID NO: 13311 - DNA, 686 bp, Gossypium hirsutum
  misc_feature (657)..(657): n is a, c, g, or t
  misc_feature (660)..(664): n is a, c, g, or t
  misc_feature (671)..(674): n is a, c, g, or t
ttgcttccctccagtagaataaggatgtgtttggcttcaaactgatccctgagccgacaccaacttgtgttgttcgccagaataaaagcagtccagttccatttgtattcactccacgtgtttctcacagaaactataattgttggcattcatgaatatttgtatttagtggcaagtaaatttgttatatgttccagtggatctgatatgatcttgtgttgagtttggctagaaattttatgaccgataataacatcactgtttatgcagacagacctttatactgaagatcggattggtttaaagagcttaatgatgctggaagggtctacttatgttagtgtctcaggtcgtcatcttagaatttccagaaaatacatgaaaaaacatgttgttattaaagtctaggattctataggagttgagaaacaaaactaagcgatcacagcagtcttgagcattaagcaatagagacttgctgaacaaacaaaagaatcgagctaagaagagcaagagcagattgcttgagttaaaccaaaacaagaagaaatttagctgaatgattcatcatcatatatcagaaagaacaaaacattacatatacaagtaattaacttgtcaaaatgaagaatgtcacctaaacacacctaactccantcnnnnntcccccnnnnttcctttccccc

SEQ ID NO: 13312 - DNA, 674 bp, Gossypium hirsutum
gcacattgagttaccctcccatgccacaaatgaagtttattatgtcagagagggatcgatgcttcaagtgccaagtgaaaaactaaggtactagcatcacaatatatattgtgtattttaactagatcatctttgtccattgtattttgtttgtaatctgtccaggtttctgaataaagcttgcatgataaaaaatcctcaagaggacttaacctcgaagggaaatgcttcaaacccatggagtctttgtacaatagatcaagtagaggatctaaaagcattgatcagagtaatgccgctttgctccgcaggaatcatgctgtccgtaaccgttaatcaaggctcattgatggtaattcaagcaggaaccatggacagacatgtaacttcaaactttgaaatcccagcagcttcattcagcttgtttatgatgatctctgtggttgtatggatcgcattctatgaccagatagctcttcctttagcttcaaagattaaaggaaaaccggttcgtctcggtttaaaacaaagaatggggattggtcttctttgctcttgtgcatccatggtagcctcagcatttgtagagtgtactcggcggaaaatcgcgatggaagaaggattttctgatgaaccgcaagccgttgtgcatatgtctgcactatgggtactgc

SEQ ID NO: 13313 - DNA, 672 bp, Gossypium hirsutum
actacacaatttcaccgatcaggtaaaatttgcttttaaggccgtgattcttccatgacacagtgattgctttatttatttgtactcaagtttaattccctatcaacactaacggttttgttttatagtctccaactctatccatagccctcactaccttctcgaagtctagctatctagctatacttatgtttttttaggttaagttcttctattagtccctgtactttacaaattttgtggatttatctttgtattttaattttatcatttttagtcttgtacttttcaaaatttaaaattgtagtcattaacaaattataattgttaaggttattaagttccactatttacaaaagttgatgtggtaaatatatcaacttgttattttcacatattattcactaaaaatccagttacatgggttaacaactgtcatttgtgtcaattaaaatttaaaaattcaaaaagtatagggatttagaatgatcaaattgaagaatatgaactaaatgtataactgtacagataatacatgactagtaattaaatttaaccaaaaaaatttaatttctattatttatgtcgggattaaaatttcaaaaattaaaaagtataaatactaatggcagaaattaaattttttttaaattaccacacctagagttggga

SEQ ID NO: 13314 - DNA, 668 bp, Gossypium hirsutum
agaaaagcatcatcttccctacaaatttgaactccaaaaaattcaagcaaaacattttttaggatctaagcaatttcctaacggataatacatagaagtaccaaatgaaacccttcgagaaaaggaaaggaaatatatagaaaagaaacagttatgaggtgggaactcttggacaggaaataaacagatcatacgcacagcaaattataggatttacagataaaattgacttattttaaaaaattgcacacacgttctttcttgtatgaagccaggaactcctgcaaattaagacgggaacttacagaaataagccagttaacaacaatattaatcttaatttctgattatatcctgtagtatcttgagctttcatacttctatccattgctcatgggctcctaagtgtggctaatatgaacagaaaaaaattaaggcttgacaacgcaacctatgtgcattgttttggtaaaaagaaactaagctgatgttgacttttcgaaaaaacacatggcaacacctttggctcacaataagacaaataccaccttgaagggaaaaaccacccaactctaaagaactattgctcctcaacactgcaatttaaaataccaccttggaaggaaaaagcaacctactctaaagaactattgctcctcaacactgca

SEQ ID NO: 13315 - DNA, 624 bp, Gossypium hirsutum
  misc_feature (14)..(14): n is a, c, g, or t
gttatggcttgggnatttgacactgcagaggaagctgctcgagcctacgatcgagcggcctttaatctcagaggtcatatggcaatcttaaacttcccctgtgagtactatgctcaacttatgcggggatcatcatcatctccatctccatccccatatctttatccttatccttcttctggtaatgtccataagagctttgacaaaggaagttcatcctccggtggacaagaaaagcaggttttcgagttcgagtatttggatgacaaggtgttggaggagcttcttgaaactgaagacgagaagattaagaagaaaatgatgagagactgaaacttcttactcatgttcactgcattttggtttgtttgatttctctttcatttccccttatttttcaactaaactactaagcatacaagtatgagtttctgcactttgattatgattatgatcattatgataaataaattttaaactttatttattaataaaagattgaattgtttgacctaatttaatgccaactaattgaacttgacaaaagaaaatgcagttttttagtgttgaaattatcattatatagaggaaccctaattcaagattttgaaggagctagctagg

SEQ ID NO: 13316 - DNA, 681 bp, Gossypium hirsutum
cattccagtaggtaattggcatggatgcatgtgtaacgccccgtacctgataccgttgccggagtcgaacacgaggtgttaacaaacttaattcattacttaaacagctcatacaattcattttaaaatttccagacaagctggctaactgcatcatagtcgctttaaaaatcatatctcaagttctaaaacttgaaatccaattctgtaaatttttcctgaaactagactcatatatctatctactaatttttttctagaatttttggtcaggccaattagtacagtttattagttaaagtctcccctgtttcagggttcgactactctgacctctgtgtattacaaatcagatatctccctgtacagagcttcaataactatgtcgtttgtctctaataaaactagactgaataaggaatctgtacatataaatcattacttctaattatttttgtaaaatttatggtgaatttccaaagtcagaacaggggatccagaaattgctctggccctgtttcacaaaaattaaaacatctcataaaatatagctcatatacatgtttcgcttattccatatgaaaatagactcatcaagattcgatttcataacttattaattatttaatttcatttctactatttttaatgatttttcaaattcacgtcactgctctattt

SEQ ID NO: 13317 - DNA, 669 bp, Gossypium hirsutum
gaaagacaaagaaattaagtcccagacaaaaataaataaataaaagacctaagcaacacaaatacaaaatatatacctatccctactaaagcttttgactgtatagtattcaatgcaatcccttccgattgtgaaatttgatcaatcatttcaaaaccaacctgttacatgcaactatgtaaaatatcatatcatcaaaaagaaaagaaaagaaaagaaaagaaaaagctgtctggcttcataatttgcaattcattacattgtgtcgagttccatggtacttatttccagggttacccaatccaacaaccaaccatggtgtatactccactttaaattcaccattattatctggcaaagaagcacgcaaacaaaaccttgttgatccttgattcctttgaccaaaacaccggcttcttggacacaaaatgcaagtgtttggaacagagattgcatgcaacattgacctaaaacaaacatagcagaaaatatttatccataatgaaataaagaacatttaggcttgctgttacctgcagttcctttatctaaaagattcaatattttactataattttctctttagagcataatccaaaaaatgggaaatttacaaatcattattttggtacatttcattcagatttctacattgtttcctttccctgg

SEQ ID NO: 13318 - DNA, 662 bp, Gossypium hirsutum
gtaaccactgcatacctatttaaggaacaacaatggagcttagcttgtttatgcttaattgcaaaataaatacatataaatatgtgggtaaattggttattagaaagttaaattttttttgtttaagttattgggcacttaagttaattttataagtaaaaaaaagtgacaagctccaaatgataatttgatgatcggtatgatggatcaatgcttatcaacgagtaaaaaaacattccttaaatctaaagtagatctagcggtcaatgttagagatcataaaagaaaaccgtttagactttgtttagcaaattcgcgatattcaaagctatttcataaaaaaaaactatagaaaataagaaaaagagaaatttcaactagtgtaaacggtgcaaatggaaagaccatacaataacgattttaatagctcaatgctttaaatgaaaatttttaaatacttcagtaactatcttataactttttaaaactaaatgaatttagcaaccttgagcgtaaacatatatatacctctttgttggctgatctgccattggtacagaagctggaaatggaactgaactttggggtgaaggtaacaatggaaaaatgattaaactttggtcaagttcttatggtttatagataagtacccatggaaatac

SEQ ID NO: 13319 - DNA, 585 bp, Gossypium hirsutum
cctggactgccgttgcagtcgcctccgccgtggaggatgatgaaacctggcggttgctgtggtggtggaacatgaggttgccaatggctttggcaccggcgattttgccgcgtttgagcatcacgttaagatcaaccatgagcttcctcttagataaaagacctttcctcatcatgaagagaactgcttttacaatgctccatactcttttggtcatgacaggtacgttctgttccattttcttctgcctttgcgttcctttttctttcttctttgtggtttgagagagagacagaaaagagaaagaggaaattagaatttgtttgggttagacggggggagaatggggtatttaaaggggaaagaaataaattaattaacacgaggtgaattgtaattttaaaagaaaagaacctaaaaaaggtaaatgtgtgtgcgactcaattcaatgatcccatcagacatataagcagtaactccatgagttaagtttcctttcagacactacaaccaaattgaactcatatggaggatgttgtgtgttattttgggggtttaaggtggttgctttggtgattaattatg

SEQ ID NO: 13320 - DNA, 688 bp, Gossypium hirsutum
tttaacatggtgaatatgatgatcctactgttaaactttgttatcaccggctttcatatttttccttcttaaacaatcactttaagaagatccatgaaagtaatgatttttttcctcttaattaaacgaaattcatatatacacacatacaaaatgtatgtaatttcatttaaacatcaactctttcatggatgctagtgtagtttaatacatctaaatctatgaaatgaatattttaaaacatacatacatacatactcatctaactgtgttgcactcctattaatttcgtatactcataataattaggtaccgaaaatccatttagatggattgttttatagtggattattattattttgtaaatgcggttatataaaggttagtatatgtgtgaaagaaaaagtaatagacataagaagaaaccaagaagggcattgaaaccacatgtgatatataatgtacctatagacaaggctgcataatggaagatattttgtatggaagatttatcaatggtggcccaaagaacatgtgaagaagaagacaaattatactagaactaaaagtggttgatgtttatcatactttcatttttagtgctggaaaaacattaattcatgccattcatcccccttctctcctctcaataataaacaatccattaccaatcaacaaccttattctc

SEQ ID NO: 13321 - DNA, 628 bp, Gossypium hirsutum
  misc_feature (623)..(625): n is a, c, g, or t
cttcagattgggaaagagaagaaacgaagtgatgcttggaaggcttttgatgatcttttaagacaatttctatcgactcaacgccacaaatccaacaaatcagtggcatcctcaggctcaaatgaagagaatgatttcaatttcttgaactgttacctgacgggacatgagataacaggcccaacaccaaaagacagtcttataagagacaaccttatacattttttgtttgccagtggtgatacttacagtttgactcttacttggttcttctatctcatctccaaggcacccatggttgaaaacaagatcagagaagaaataaagagacacttatcattgaaacaagtgcagggaatcttgcaaatgccatccaactacgacgagttgagtaagctaacatatcttcatgcagcgttgtgcgaaaccctaaggctatatccaccgattccgttcgaattcagaacatgtacaaagcaggactttcttccgagcggtcatcgggtggatcaaaacacccgaatcataataggaatacatgcaatgggaaggatggaaagcttatggggagaagattgctatgagttcaagccagaaagatggattagtggaaatgggaagannnata

SEQ ID NO: 13322 - DNA, 612 bp, Gossypium hirsutum
taatgattgaaagctccggaatatatctcaaatcaatgtacttgttatgatgtcctagttccttataataacccattcctgtgttaccaacaacaatcttcattgaggttccatcattcacctcatcagtttgcaacaagctttggagctgctcaagacttccaggactataccaacgacacccttcagattccagattgaaacctgccttaatcaccgttttcagaaactccggaaacacacgaattgcgttgttacaattgtatggaggtaatctactcagctttatgttttcactttctccttttttccaaaaggagttaaatcccaaatcctccatatcaacatcagcagcaaaacttttacaggcatctacaaggggtcggtagccagtacagcgacaaagatttcctgcaatagacttttctgcttccgaaactgttagcttggagaatccaggacgtaatcctgttctatcggttttatcagcattaatgagtgctgaatatagagaaacacacattccaggagtacaataaccacattgagaagcatggaaaccagaaaacctttcctgaatagggtggaacccatccttgctatttcaaactc

SEQ ID NO: 13323 - DNA, 645 bp, Gossypium hirsutum
ccgaaggaacaaattacccaaaaacactgcacagcactggactaaaataaaacagattcggtatttcatggaaaaatttgaaaacataaaaaaaatggttttgaaatgataggataaaatgaaaggattaaaaacaaaaataacccatcaatgtttaaaagttgaaatccatttcatttgcagccaataaaacccatttcaaaccctaaaaattattctatttcaaatgcagccacagcaaccagtcccttccccgctcctcacgccgagaactagcaagaatgccgacggcgcgcctctactggtaagaaacttctctttttcctcgttatttcgtttattttcgttgttttaagaaacaaaaggaaaaaaacaaagtaaaaacaaaaacagtaaaagaacagaaaaaaacaaagccaaaatctgtcgcctttcaaaaaaaattttctctcttgtattttccttttttttatttttttcaatacaaaaatttgctaacccccattacaaaaaaaacaattggctttatatagcctataataaaccaacgctcccctcttcattttgttgttattttccccgtttatcgcctattgtttgctgttcatggcttattgcaggtaccactggcgagaggtcgtgtgc

SEQ ID NO: 13324 - DNA, 666 bp, Gossypium hirsutum
atagaatgctcgtggaaagaattaaggaagcaatagttagttaccctcaaaagtttgttgtcaattagtgtatacgatgtcgtgtttatgttattttcttgtatcgtaattgttttatgacattatatgttttttaaaattttggcatgttaatgctatgagttgtatagatttagacacagtctatttgcacactcaaattcttaaacgtgcaatggtattggtttttcacgtgataatgattgaattaagctaaactcaaatttgacatttgcaatgtcataatcaacctactaacatccatttttgtaggattgacatgataataaataagtttttatacatggatttgaataaacgatggtacaactacaattataacctatattatccagacttgggtgaatggcagataaaggtatttctataatacaagggtcggatattgatacttcaagaaaaataaaaagtttcgtgtaacataaactataactatgatcctatttctattgctccctcctaacatatacaaccctatacaacttaataaatataatctatgctcacatcttcttatcctttcatgtgtgctggaaaatcaaatgaagcaatgcatgaatgcagaacccggatcgagttcaaaaaactactacgaagactgatgat

SEQ ID NO: 13325 - DNA, 565 bp, Gossypium hirsutum
  misc_feature (60)..(63): n is a, c, g, or t
cactgaactttttgtattcagaaacactgttagggaagcaacaaggggtgcagaaaaagnnnnttttttatacagcaaaaactagacaaatttgaattttatagatagagagagagaaagggaaatagggagacaagtggaatataaagcaaaagctacggcaaaagcaagaataaagaaacaatagaaaatgcagaagtcagtgcaggcgaagcaaaccggggggggggggggtttttttttttgttgaaaaaaaaaccaaggggggccccattcgggcgggtttttccccaaaacttttcagccaggttataaattttttgggccccccctttcccccaaaaaattgggggggggggccaaggggggttcatttttttttttgcccctgggggggtaaaacccaaaaaaaaaaaacttccaaaaaaacccattttgggatagggggggaaaaatttttttttttttccccaaccttctctttgggggcgggaaattgggaaaaaaatttttaaaaaaaaaaaaaaaaaaaagggggggtttccccctgggtttacccaggggg

SEQ ID NO: 13326 - DNA, 660 bp, Gossypium hirsutum
catcaaaattatgcctttatcccatcatatttctcttaaagaatgactgtagttttactgttcatcattatttacaagcatgatttgaggtcaacatgtagttaaagcacatttaagtttgaatatactacaagtagtaaatggagcattttggttgggtcttcctaattttggttgattccatagtttatgctcctaaactaatggattggcctctgatgactacacattaagagatctgctgtgtggacagatacgggtcaaacattttacatctattcactacagtagcaattatatggaaattttgatttgccaacagcgtagattgagttggtagggatcagatgcttttcttgtgaagctcaggtttgattgccactgccaacagttccatgccttggccctactactggctatccttccctcacctaaacttgttgatgtgatttttcagaagtaaataaatgcattagatcgaacattgatactagcttcatttctttagttcaatcatgagtttaaggtttgcaatagatgttgcctttccaatctcaaattggctttcttattttagcagatctgtacaaaatcgggtattttaagcatcttattttctgtgagaataatccttatggcatggcttaatctgttaatcta

SEQ ID NO: 13327 - DNA, 620 bp, Gossypium hirsutum
ttattgtgctgctttggttagctgaacagccttgatgattttaaatagtagcttagggcacttcaatagccatggagtgtgaaccaacgaatttgagtagcccttgggtgtgaaaactcaaaaacgaatagccataagtgttaaaagaacctcctgcaaatgtgaaaacgtttaagggctattggagcacaatggccagcttaggaagagaaatcagcagctcaaagactcttggacccaacgaaaacgtgcttggagcatctcaatcatcagcacaccatatttaagccaaccatgcatgtacctgaaaaaattaaattcagctagttaatcaagccaagacaaattaaattcggctacatagaattaattaaaacatgaacttaatttgtcttaaagttagacatatttaaataactattaaacaactattaaatatgtattaaactaagacacattaacgttaattaaaatttccagattataacacattaaacgtaactttaattatttgagctgaataagctaattgcatttattttattccatcaactaaaattgtaaaaattaaaataaactcaaaacgagcaaaacgagctcattgagctggaaatgagctg

SEQ ID NO: 13328 - DNA, 596 bp, Gossypium hirsutum
tatacacatatacatataacactatttcatcatcataataacattttcacaaacatatcatccacttctggcacattattattcacacctgtatggcaagaaccttccaattatcttatttaaaccagtgcatttatgcatgcattctatggattttgaataactttacttatcccattcattcaatcaaataagtcatgcacataacatcttatgagggccaaacaaacatggataagtatgtcacaatcaaaacttttatcttgcacatcatcttatacatatcattaccatcatataactcaattcaatcaattttagcacacttacttaaactatacgagtttgcccattctaattatccaaacaagcatacaaaaacatttgttccatcaataaggttggtgagttacccaaatacatacattcgctagagcaaatctatcatatatatcatagaactatcaactgaacatagataagcttatcataatctgttcctttatctcatttaaagatatcattgcaatccatcaacatcatatgaatatcaaacaagcataggtactcatcacaacatgaactttcccctcaca

SEQ ID NO: 13329 - DNA, 560 bp, Gossypium hirsutum
cttgcttagctcttccctgtgtaaaatttgtaacaagttgaaatccaactctgcaaacttcaacagcgttttgttttgtgaagcatcgccttggtaaatggaaatgaatcgcttagcttccaaccttggcaagcccctgcggatggattggtatagagcatgggagactaaggctgaaaggggatattcgatagtgccagaagctttggctaaacctagatgagtggtagtgaaaccaagcgcttcttcaagtatatcttccccatgcacacgtaaatgtgaagcttcatataattcgagtaagcctttcacatcacttgttaaggacatgttaaagtttccatcatcatctttgaacttgtggaaccattctaatcaacccaataaaatattattatattaatcattgtaatatagaaaaattaaatctaatatggatctcgatctggagtattgaattgattatttattttgtgttatattatacagtgaaaatttcaaaaaaattattttattttttaacaattttgattaggttggatcatctattcaagttacgg

SEQ ID NO: 13330 - DNA, 461 bp, Gossypium hirsutum
gaaaattacagtttgggaaatttaagtttattggtgagaattttattttcgaccatcaaattaatttgtttcgctaaatttcatccagagtcaagattgtaatattattgacagtgccaagaaatttaggatgaaattgttacatttttgtcccaaatgtaattaatatgttagaataaattccaatgtttcataggaaattagcaaaatatttcttctaaacatagtaattagttttgcctttttctgtataatcctcaataaatccccatgttgtgaggtgtgaaatgatttaaaaccactgcaagccgacttcatggggaaaaaaatattttttttactctcatgcaaatagtaaaatagattaaacttattataacatgtcatcacctcaggtcgcaggaggaaagcactaggcaggcagctcttggttaaatgggtaaatgtctctttaacctctc

SEQ ID NO: 13331 - DNA, 666 bp, Gossypium hirsutum
  misc_feature (662)..(663): n is a, c, g, or t
ctgaagcactattgacaacacgaaacgcgccacgattcaaacttgcctcgctttcttcccgatctacaccttgcagacaaaaagtatacatgaagaattcgaccaccagagaattaaagaaggagagcaaatttgattagatcaccacaagcttacactgccagagagcaaaacgatgcaacaatgagatccttgagtagccaaaacattcaacaatggaggaacaaaatcagcaaaaggaagaaagaaaatcaagcaacgagttgtaaatgaatagaaggggaggcacaaaaagaacaagggtttcggggcatgattgtggtgaaaatgaaaagaaatttgaagaggaagagaggaggaaggaaaagaaacgacagaaaggaaatcctagcaacaaaagaaaacaagcgtgaaagccaaaatggagaaagtgggaaaaaaaaatggggaattgagtaaagtgtggaactacaaaaacatttttttttattcttatcctcttataaaaaataaattccaaaacaatttaattaatatccaatttatcaaaaaccctccaaaggtttaacatatattttaaggagttaaaattgtaaataaaaaaatacttaaaaagcggaaaaaaatttcacattgttcacacgtggactcaaactctaaannaaa

SEQ ID NO: 13332 - DNA, 670 bp, Gossypium hirsutum
ttgatcccaagtcattgaaactaaaccatcaacgaagttattaccttctctatagatatgttgaataatcacctaccattccttattcatgcatttacgaacctccctacatattcgatattcaccaaacttagtaattctaaacagcatgttaataacttccatactatctattttcaaatttccgacaaaattaatatttttatttaaatcctatcaaatttcaatcctaataattcggaatcacgagtatatctaaaagcaactattcaccacacgcttgatttacttgtgtaatcatggctgtaggtatgaaatcgcctgtgattttcaacttacttgttgactatatcagcacatctacccatgacaattcctttgattctctcttccctatcctttagtagtgtgtgctatattaccgtaattctttcacagcaaatagacgacaatatttaatattattcttttgtttgttgtcttttcaagaaaagtttcccaagctattcaattaatacgatttggtacagctacttcaaagatttggatcaataccaaataaataatccaattttaaaaaaggcttaatcctttcatgtttcagaggatcttttataatggcagagataacatgattgaaatcaatgagttgattgaggcaaagttagtg

SEQ ID NO: 13333 - DNA, 678 bp, Gossypium hirsutum
  misc_feature (667)..(667): n is a, c, g, or t
catttcggaaggggtgcctgtgatttgctggccgttctttgccgaacaacaaacgaattgtagatttgcatgcagcagatggggcattggtgtggaagttaaccctaatgtataccgcgatgacgttgccgcgcttgtgaaggaaatgatggaaggtcaaaatggaaagaagatgaagaaaaaggccctggaatggagggaaaaagttcatgttgccactgatgtcggcgcatcttcttacaataatttcgacagattcattgaagaagttcgctccatctccgttagtcgtcgggcctaggcatgagtaccgaatttaaacatgtagtcactaatatatctaatttcttttattaaattttcatatgtattttgaaaattttattttttaactcatatgcatgtttacatgttgagataaaagaagagtaatcctagctacataactcccgatcatggagaagggatatcgagaaagtgttgcaaagttcaatggtgaatttgatttaagaagatatgcatttgaatatgtttattcgtaaattatctttcaatttaaaaagcaaaggacaaatatgaaataacattgtatctcgttatagaatgtcattaatgaatttgttaagattattatgcgaagatcctccaacattagtagcctcttcantagcctcttca

SEQ ID NO: 13334 - DNA, 711 bp, Gossypium hirsutum
tttaaggccattaaggcgagattagcttcaattgaaagggaggccaacacttttggcttcattccgcgtgatcgccccgcggaaacctctttcatgactaaaaggaggcagcaaacgcactcttttgagcgtgaagatgacataatagggagggatgatgataaagcagctcttctaaaactcgtgttggagtttcaaagtgaagagaatgtttatatcattccaattgtggggtttggagggttagggaagactgctttggcccaacttgtctataaccatgaaatggtcaaaaatcattttgacttaacgatgtttgcgtgtgtttcagatgattttgatgtgaaagttattgtagcaaacattatcaaatctgtgactaatcaagcacctgatcaaaatcttgaaatggatcaattgcaaaaacaacttcgagataaaattgatgggaaaaaatatttgcttgttttggatgacatttggaatgaggacccagaaaagtggtctaggctaaagaagttattgatgggtggggctaaagggagtaggataatagtaactactcgatctctaagggtagcggagataactaataaatgtcaatcccatgttttgaaattgaaaggcttgtctgatgatgatgcttggtctttgttcaaaaagatagcatttgagcaaggatatgcagactcaacaaattcagcctttgtg

SEQ ID NO: 13335 - DNA, 649 bp, Gossypium hirsutum
ttttgccactaaaccaatgacttagttaacttcaacaataaacatttcgatgttttcatccaatatcaaaatgttgcaaagaaataagcgatgataactgagaaaaatcaattgaagggtttaagtcctaattagtttctagattctcctagatctaactatttgcaacatccaggatcaacattatcggtgcatatttagcaaaaaacaagccacaaagacaatcttcaaacaaaatacagttacaagtgaatgaaataatgtgtgtatatatatatatacatatcatcaagatctcatgtgtttcaataatgaaaccccgggcttaacaaaaataaaaacactaccaaccaacaagtgttgcctataataataacacactgcatttcaaggggatgtaggtttgaacctcgaaaacaacaatcacgaatcccgaacatggataataaaacggacatagagaattaaaaaacaagtataaaactgacaccttcgatagaaatctttgaaatatctcgcagatcaagattttgtctctcgactttaacgagagccagaaaacactaaagaaatgtggctcacaaatcggaagcgcctcacctactatacaaaaagtgaacatttgccgatggtagggcatgagttcaaa

SEQ ID NO: 13336 - DNA, 616 bp, Gossypium hirsutum
  misc_feature (61)..(61): n is a, c, g, or t
  misc_feature (493)..(493): n is a, c, g, or t
  misc_feature (499)..(499): n is a, c, g, or t
  misc_feature (508)..(508): n is a, c, g, or t
tattttggtgtctttcatcaggctttaaaaaattgattgtttagttttagcttttttgttnattttatctaaaatgagatcatcaaagaagattggtttgcaatttgcaaaggttgacaacccaatttaataaataggaaactctttaaaacaccagaggaagatgtcgaaaatcttgataatatttgctttcttaccctttcaaactttgattattccaacataaaaaaggaaaaaaatgaaaaaaaaaatccttgttttttgcagcatttgatgaatgctatttgaatgttgattatggtccaggtcagggctcaaaaataaaaattatttaatcaatttttttctaaaaaaagacaaatatataaatatatatgcaatggaaaaagacttgtgcttccatatattaagggcacatcaagttggatacagattaattttatagacttctgtttgtcctttttcagcttttcttctcaaaaaaaaaaaaaanaaatgnttcataaantttcaaaaaacaccccaattttttgaaggaacactgttcccagttctccatcaattataaaaacattggtccctttttgtgaacttggtaagcccttgggccatatcc

SEQ ID NO: 13337 - DNA, 677 bp, Gossypium hirsutum
cagactcctagcttcctcttcaggcttagaaatcttgatacaccaagaggctttgtgaagatatcagcaatctgattttcagaactgcaatggattagctcgatttctcgagcttgttccatttctcttatcacatggagtttgatgttgaaatgttttgtcctgccatgaaagacaggatttttagcaatagcaactgctgacttgttgtcacaatgtatcacagttgcttcattctgctgtagattcaagtcactcaaaatttttctcagccacatagcttgattaacagcattggcagctgctacatactctgcttctgctgtcgattgagccaccattgtttgttttcttgagctccaacaaatcatagctgagccaagtgtaaaagcatagccagaagtgctcttcatgtcatcctttgaaccagcccaatcgctatcagtgtagccaatcagtttcaactcttcagcctttctaaactgtattccatggtttaaggtacctttaatgtatcttagcacccttttcccagccttgtaatgttgctggttacagcagtgcatgaaccttgatagcatgcttacagcaaacagaatgtcaggtcttgttgctgtcaaatacaataaacacccaacaaggcttctgtaatctggttcacaaacagattcatgttc

SEQ ID NO: 13338 - DNA, 563 bp, Gossypium hirsutum
  misc_feature (67)..(67): n is a, c, g, or t
aggtcgagactccaatcttcataacaaccatcatcaatccctacttagatcacaacagattcctttnagtgaagacaaatacgagacaaacccataagttaacacataatgactactaacactttaaaacagtcaaattcaaggccagactcttgtgaccaacaaaataagcaatcaaagtaaaaaattttaaaattttacccaacattttccccagtttttgctcctccttatacaagtatgatctaaatttctatccatatgttagggcatgtagttttgataaagaatcaaaatctactagtgtgtctcccgtacttaataaacacttaaaaggatgatattagattatgttagttgtagtacagatgtgatactagcttgttgttaaaccatcgttcgattttaaatagattgattcatagaggcacattaggttgcaatcatgtgaagtttattcttacctccccagctattaaaattccaatcgatcccggcaactctgtgcttgtggttatcagaaatcactgctcctttccttacaacaaactgcaagaaggaga

SEQ ID NO: 13339 - DNA, 698 bp, Gossypium hirsutum
cgtgctgaaatcttgtagtccaacagctataaattatacatatacacatacacatacacataccacgcacacatgtatatgtatgtattctctacatttagttaatgttaagaattataccattattttctctatatatagtagtctttttctttttctgacacactcgcaaaacaataagaactactggttcttattccactagaagtaaaattagctactataaaatacttagtaatattattcggccactaaggcctttgagcctaaattaattctaaattgaagcggagaggtattattgtttctttcctgtaccaagcaagaaaataaatttaagagaattatatatacattttatttcattctcttaatacattttccatttattatggttgatatttctgagttagcttcctactatatattacaataatctcaaatatttaattgccaaagccgaaaaattggtaacatatatttcatgagatgagaaattgaaaatattgaaagttctgggtatcctatgagaaatggaaaatttttacgatattaacagcttagaggttgagacattaaaattccacattcatcccaggccaagggcacaggtttattaacagtcagcttgatagatcatggaattgcttagttccaggattggcaccaaaaagaaaaccagaggaataagcataccc

SEQ ID NO: 13340 - DNA, 637 bp, Gossypium hirsutum
agtctaacaccgagtttcttttattgtttgttcagattcaaattctaaaatcgaagagaaaatccctgaaggcgaccaaaccgtacttccattttctgtcggcgaagatgcgatagatgaaaaggcaaaattcagaagcgatataggcttcaggctaagggatgttaacagtgtctcaaagaagtctgaagccttgcaatactctgatgaagcctctcatctctacttagtgtaaatcactacccctttaattttgtatttattgcattttgacatgataggaaaacacaacaccgaatgacatttctaatcgtgtttcctgtcataattgtgtcaacacattcatggcaccacaaatctcgtgtcataaaggtgtaaagcacacataacacacttaaggcatgattagtcataacacacttaaggcatgattagttagtgcaaatgaatgcctttcgggttttgcttcattacttctcttgatatatatagttgttagtttgtcaggtcataactgaaggtagaattcatggtctaatataatccttttattctaaatgtagaagcatagtggcatccataaacattgctgtttttatatttgagatagccactccagtttaaagtctcacagctg

SEQ ID NO: 13341 - DNA, 429 bp, Gossypium hirsutum
ttgatttatagttaaaaatattatataaaaataaatagaaaaaatataatgttgtctcaaatgaatattttaattcttttgcatgcaaatgttcatcttcctacctttacctaaagggagagcattcttatgttcgagaaatgttgatttttctaattaagaagcagaggtaagagttatctgaaaaataaacttgaaatcgatgttgatagaagattaaacacaaatcttttattacttcaactatagttcattaagagtatagatataaatataggattttttttttggtatttttcacatttattttaagttcatgttcggggtttgtagttgcctctcttaacaacatcatctttaaggttcaaatcatgttctctcattgaaagtgtaacgggtcttatcaatgcacccaatacttgttggaaa

SEQ ID NO: 13342 - DNA, 470 bp, Gossypium hirsutum
tggtggaattgtcttgcagattttaccaatccaattttcttattttcataattcaatttgcccctcagcaaatatttaaatatataaaatcctattttacattcatctcaatattttggcagtaaggaatgaattagaaaaaaaatatatgtaaatgattttttttataattttcatgaatttcttaaaatattaactgtagaacaaataatagaaacattaaatacaattttttaacacattaattgttggctataaatacaatcttcacattaagctttactataaataaccataatttttttatacaataaataaccagaatttaaatgttttttagacaaatcaaatattacaatatatatttacttatatgatgtcactcttaattgtgattatcattaaaaaattatggtaatttgttttattacaaccggtaatttgcaatgatcaacttttataagagtgaa

SEQ ID NO: 13343 - DNA, 471 bp, Gossypium hirsutum
actcaacattagctccatgagttcgaatcagcttgatgagttcaatttcaactcaatttaatttatgcattttattagttgctggaataaattaaatgtgttagttaaattagttagttcagctcaaataattattaagtgtttaatttttcaaaatctggacatcttaattatgtgttaaatatgttttattttaatgcatgcttttaataagtcttagttaatacacatcattaatttgtcttagctaatacatatcattaatttgtcttagcgtattacataattttaatatgttttagctccagccgaattaatgtgcaggtttattatgtcctagttgctgctgaattaatgtgccttaagctcatttaatttgctgatttattaggtgcagctacatgcatggacgtcattaatgcaaggtgtgctgatgtttggcctctcctaagcacccatttagctaatgtg

SEQ ID NO: 13344 - DNA, 650 bp, Gossypium hirsutum
ttcaaagaaggcatcttccccctctttcattttcaaggcgcctcgtgagctgcgtcgggtaaatgaaagtgcctttgagccgcaaatcatctccataggcccataccaccacggtaaacctcatttggaagcaatggaaagccagaaactccattatttagatagcactcgccaacagcccgaaggtttggaactctacatcgacgtctatatgtccatagaacagtttgtttgggattcctacgcggaacatgatcttaagaaacgtgacgaatttggggcgattatagtcctcgatgggttgtttgttgttcaactctttcgcaaagtcatggatccaaaattgagagaagaaaacgatgccctcttcaagcagaatttgaatctatctattgtggcagaagatttgttgctgctcgaaaaatcaacttccttttcgtgtattagaaatgtccggtaataagcttgggattgatggagcaactttaagaaaggaagcacttattttcttctcagaaacagaaccacggcagatcggaatgttatatgaagatgatcttatcccaatgttatataaagaagaaattattatccgaaatgacgagcatctactaggcttggtgcacgataattggattccacgacaacca

SEQ ID NO: 13345 - DNA, 678 bp, Gossypium hirsutum
tagggttctgccctatttttgaatcttgggccacttgggctgatataatttggactagttttattagttttgggctatgggtcatgtaactgggctatggggtattgggtttgtgacttgggtcttggattttaattttgggtttagggtcatgtactaattttaggttttggactgcaatgatttggtttgtaaaaggatactaaaatgggctgtttgtgttttaaactttttgtttattgatttattttatattttgttttggtcttttgtgtttgtttgggccgggcaaatttagcccactacatttggtattatgccaaaaaaaattaacaacctaatgaaaactttcaagtaagtcattgaccattatataactttttatacctaagtgaccaaattgtaaatttagtttagtgacattacgtataatttcccttttcttaatttaacagagggttggggaggtgaaggttctagcccgacccaatacttagggcttttgtgtggcgatggggggaggttcagtggatggattaggcccattcccatcggtatgtcttgagaagaaagaaaagctccaatatttatataaaaaaacaaaagcagcaaaaagagcaaagtattttagtggtgggggaaaagagcagagaagaagaaacaaagatgagcagcatc

SEQ ID NO: 13346 - DNA, 646 bp, Gossypium hirsutum
  misc_feature (59)..(61): n is a, c, g, or t
  misc_feature (592)..(592): n is a, c, g, or t
cgtctcgactccctcagttgttcgggaaatgggtgtagagtctcttaattgcaattgcnnnggaatttttcaaagtacatttgtataccgtgctagaagcaccatagcctatgatgtacttatcactcaaattatcagtgaatctcattatatcatcaaaggtatgaatagccatatccatgtgaagaacaaccagcttcggtggatgcgcaacagatttcataggacccttcatcacttgcttctgttggtttgacttataaatcgcaagaatggtcatagccaccaaagtgatgaagcccaaagtcatacaaacaacagcagctcgggagaaaactgctcaagaacataaagcaagaggaagtgttaatgaaaggatattcaaatgagctcaatgacatcacaagttgatacctctagactttggcatagatgggcgacatattgatcccagccaatctccacagagcatcgggtttcctaggaagctgacagccatatataaacgaattaataaactaatttgagagggcttttaaaacaaaaaaaaaaaaaaaaactcgcgtacctatcggatgaaaaccgggagaantttcttgtcggaggtatgacgccggataaattattgtacgacacattccctggg

SEQ ID NO: 13347 - DNA, 679 bp, Gossypium hirsutum
cgttggtagctcggtaatcagatttttttccatcgcctatcatcattattaacgataacgatagaaaaaattcggataaagtgaaatctgtctgtttttaacctttttttgcttgctgagttgaatcaagagaactaactttaaaaaaagaaaaagacaaaaaaagggagaattcttttcctatttccttgtcaaatttaaagtttttaggttttattagtaagcttttgtagtataactatgctcatagattttgtatagtggagtggagttggcctagatctagtaattcttgtatttatcggtgtgatttgtagactaagatattttatattattaataattattcggtttgtatagattttgagacatttcgtatatttgtatcttctgatgtttatatctatgctgtgaatgtttaagatattattatattatataaaatttaatatattaataatttgtattataatgatttttgaaacattttgtacatttgtatcatgtcatgtttgtcataatgttttcatggaatcgtgtttaatatagccggtctcgttggtcccatgctgttgttccattacttgttattatggtattattagtggaataagatggaaggttttaatttggaaaagaaggatagaaggtttactgcttttaatgcttgatgcgtggc

SEQ ID NO: 13348 - DNA, 669 bp, Gossypium hirsutum
tataccttctcatttgcctagttggttcttgaaccatttttactttttaccatagtcaagatagacaagctttttaatgtgagaatatcaagatagacaaagcatgaataaactttgttggaagttagaaatttttgttggctatataccaaattatgctttactgtcaaattagaagccatgaaagtgtaagaatatccatggtagatactggtgggtgaaacacattgtttagattaggttgaagttcaatagatcatacaacttgtcaataacataaacaatcttaatagaattgacattaaacaacaaaccccatcatgaaactggattaattagtcaaagaatccaagggtggactgaaaatcaaagagtctgtattcgatgtccttttccaactcgtaaattatcaaaggttgggccatagccattgagttttgttccctatggaatgtaatgctgaagttacatatcaatatcattatgcttttctttcttttggttacttattttggatcccacgttcaacttagtggggttttttttaataaagttggtagggtataaaaaaggggcactgcaaacttcttttcatatcctgaaatcatgattcaagacctactttaagttatatttttttccaacaatatcatcgtatggtatcttgta

SEQ ID NO: 13349 - DNA, 649 bp, Gossypium hirsutum
acgtctaccaaagaactctcaagtttttagctttcatcatctgtaaaaataaatatataagaaagatcagacaggaatactgcaaaatgatggaaataagtaatgtttcacatgcttatatcatatggtttaaaccataccaaattcatcacatctaggaatccaaaatattctccaaaatcacaaaaaatctcttcaatggcatcaggatggttatatacaaataccaaagagaaatgacatctttttacttttccttcaaaggatctttcttaaagcccacttccacgtcaacttagctttcaatgtctgcaaatatcaataaataaatttatactaattcctattattatcttttcctaaggaaagttagaaatgtttgaaatggttttttgtacctgtcccatgactctgaaaaaaccaatcacagattttgcggctcatctttcaatctgattccctcgggatgactcttttaccaccaattttaacaaggggtatgtgggaaatcttagaccactctcgtcctttatcgcttgagcactcttctttcagcaacggacaacttaaaatatgtaaaactccaagcgagccaagcatgtctttttccggaagagatgttagcttgggacaatcactgatttccaat

SEQ ID NO: 13350 - DNA, 656 bp, Gossypium hirsutum
  misc_feature (635)..(635): n is a, c, g, or t
tcaggcaatatagtgtgtttgtcaaggatgttggaaacagaaaatcttggtcggtttgaaaacatctttgtgttgaaaactgtgatcgagataattgtaggaagaaatgtgggttttctttcgacataagtgtatgatggaatctgccttgggattttcatagaaaaaagttacacactattcaaatgtatcatcttttattatacattattatttggatttgatcctacttgattactgataaaaatgatccaaatgcactcattattgttgatatttgtgtgtttcagtacgaacaaaacaatagaacggtatcagaagagacagaaggatatccatggaatcagcagcaaaggggaagatatgcaggtaatgctctcttcatatatccatctcaatgcattaaatataaatgtttgcaacttagaacctgtgtaatctctaataattgaaatttggtatgggaatggaaggatgatgtaaaggaagacgctcacagactggcgaagaagatcgaatctcttgaagattctaaaaggttaaaaacctgagctccatacttttacttttatatatatatatatcactcagttccacttcatgtgtaaacccctgtatgtttataatgttataanaaaaaactcctgggacgtgga

SEQ ID NO: 13351 - DNA, 569 bp, Gossypium hirsutum
  misc_feature (530)..(530): n is a, c, g, or t
  misc_feature (551)..(552): n is a, c, g, or t
  misc_feature (554)..(554): n is a, c, g, or t
  misc_feature (557)..(557): n is a, c, g, or t
  misc_feature (564)..(564): n is a, c, g, or t
ttttcataccctgtgtatcatatttttaattaggttaatgatctcatcacaaccaacaattgaggtgcttttttttataattataatgatttgttacaatttatatactattgaataattaaagttatcgaaatttgatctatcaagtagtattacaacaaatttatttaaagtttggaaatatatatatatataagtatttagaaaatataaaaaaaatccgaaagttaaactcagcatcattcacaagcatcaacaacaactctaggaaaaatgcatgaaaaacaattataaggtagacagcataattatcggcttttgaaaattttatgtgtgaatacgatctttaccattctattcatataagcaacacttttttttttctttttcttttttcctttacagttcttaagcttatccattatcaactttcgatcccacccatcttctgatttatgaattgtgggtcattttggttgatggaaaaaagcattgaccaaattactgctgcttaattttaagtaaattcnaattgctggaaaagataaaannanganaaaatcncctct

SEQ ID NO: 13352 - DNA, 654 bp, Gossypium hirsutum
attcatgtttataggctccctgccttctttttcatttatttatttatttatcttttctctctcgtctctcacagacttaaaaactcattggccttctggttaaaatgtctatcaaaaacatttgagaaatatgctttatcagccatttttggtgccttctagatgttacaaactgtcctattccccacacagatgcaaatgaaccaagttgctcctgatcaacttgaatcttgtgttgcaaatgctgccttttgttgttcatcatgaaatctaataaacaagtttaagcttgatcattctgttaaataaggcaagtttaagcaagagggtgttaagcatttagcttgtttatgctaatgattattaacttgtgaacaactaaattataggctcatttagactatatgtacacgaatgcaatattcttttattgagcctatttgtgcgtattggatgcctaagatccttgttaaaacttcttaatttcatgaatgaactcagacttgagttttatgcaggagcttgttatttctgtttgaaacaaattttacaaagcttaattatgtaaagagtcaaactcgtgcctgataaaagctttaagaagcaagcttattaagatagggcttgattcatgagatggttgtcttggctcat

SEQ ID NO: 13353 - DNA, 681 bp, Gossypium hirsutum
ccctaaaggtgccaaagaaagtagtagcatagcctaattaccagcaatggggcccattctcactcatttgagtgcccttgttaaatattaggatatttgatgcttgcacgtatatacatgtatatatctgtctaggaaagtgatatctgtttatctttatactgaattctggcacttctcaataccactagaaccagctttagaagtaaaataaacccagtgagaggatgataagatttttccaggataatcacctccatggttcaagctaaagttcagtaacttaaaatatttttgtttacaagaacaatatacattacaaaataaaaaagttgcactgccttacctggatatgtaggtaactccagtttgtccgattttatgtacggttttaagagtcacatttccggatgcctaccacaatgaaatagatacatcacttacaagcatcagaaaagttcaaagtagaacattaaaatagaagttaccatgtaaaactatagatggcattcgacaactacacgagcaagaatgccaaggtaaatcaccaaaaacaaattacaatttagaaattcttaaaaaaaatttaagtagcaagagctttcatataaatcttttttgtataatttgctcatgtttcacatatttaaagaccaaaacagcaagcaaatagagtgaaac

SEQ ID NO: 13354 - DNA, 618 bp, Gossypium hirsutum
tttttgtttttcttgcgtcctttgtatgttttgtagctaatactttcagattctgccgcataagattaatcccagcatgatgaggcaacatcttttgattgatcacatactaggattatgttttcattgtcatggtatggggcaaattaagggattttcccttggcctttccttgggcacttcagtaactccatagaccgcttttggctcattatgtcatcctacatctcttactacagtgccatctagggcagactgtttgcccatgacacacctattttaacatcattgactgcatgaatgctatagcctaacctcgttgatggggtatcctcctaatatagcccaaagtttctccctgtccctttgatgtgtgccttctagtctactgtcagttactggtactgctcctggagatacctttctcttgcagtatatgtatcgcttgagtgtacaccacttctcctggaagatacagtctagatttgggtgttcctttttccccttttttccaatatgctatacagccagtatataaagaattatctaatcccctattggaagataaaatctagatttgggtgttcttttttcccctttttttccattatgcaacac

SEQ ID NO: 13355 - DNA, 643 bp, Gossypium hirsutum
attagcaatggtatctgacgatacttttgccttgcaagattattgtgattaaactgtttcaaggtaaggatacattgttacctcacatagtcttgtatgtgcttattaaatctagttaattgtttgaattgacattagggatatatataaaagattattttgatttaataagtatgtatgtgcaataacatatttgcctattaagatttgtttaatcggttgaattgacataaggatatagtcaagagataaatgaattttggtagctgagtatgttcatattaccgagttgccgtgaacttattcgtaacaatataaacatgagtttaataattctaagttaagaaatgtaattaatctaaaacaattatgtcatcttgattaaaattgtattttgaaatcatgcatttgagatttatttaattagttcacttagtttaaaatcttagtttttagtcaccctcttgaaccaaaatatttttcttcaccaaattgttttaaatagcattcataaataattcttttcatagtctctgtcggtacgataactcgacatttacttgtcactttattacttgttacgattgtgtacacttgcacatttccgtcattcgaaagactcctggtgtattcacaaactaag

SEQ ID NO: 13356 - DNA, 609 bp, Gossypium hirsutum
  misc_feature (401)..(401): n is a, c, g, or t
ccctgatcaagaaccttccatatatgaagcttgcatttatttcggatgccaaagaattttcctgatggactaacagttaaaacctctggctttcttgtctgcaaagcaagataaaaacatggtatcaaatatgatttacatatatggtcagttctgcaggtaattcttaattataaaaataaataaactcaattgcttaaataagaaaatgctaatccccaaaatgttagtaagccaaaattattgtgataagaaagcaaacattccaaaacatctcccatctcctcattactcaaccatgtttaaacattccatcatgaaaagaattttgaatgttcagacaacatgtcaacagtgaaatcgacttaataaagctagaggtatatacaacattctaatancattaattttataagtcaaagttggcaggtttatttctggttcctgagtaaggcaaaacatgctttgcatttaaacttatccatacagatatgaaaaagctcaatagaaatcttttggattatacctctcccaaaattaatctaccaactaaacgagacttgcttaagttacacttccggatttgtcttctcgaggctttggtcctct

SEQ ID NO: 13357 - DNA, 646 bp, Gossypium hirsutum
gagttaaggagcagagaggccccatcattaacttccatgaagaagatttcattagctcaaaggatctactggagtcgatgtattagagaatgaaggggagaaaaaaacatttacgtcttccattttgatgaccctatagaccagtcctatattctcagagagaacctttggtcttcggagggggctttttttgtatttgacatatggcgtcctaatatggttctccgaaacctttatttactagaggcacccgtttggttatagataaggggattactactggaaatgttgaaccctattactgcagtaactatagcaagattagctggggtagtaatggaggttgactggcatgcaaagtttccaatgaatattcggttcctaagggtaagaatatgcattgactcacggagaccactactagcagggtgcttcgtaagagtcggagaaggtagagaatctggatccagtttagatatgagcttgtttccaagatatgaaaaactgtgggagaataaggcatacctaccctagctgtagtcctgtggagttgataacctggatatcgaaagggaactaaatagccaattggacaacattagacacagatttggctacgatataggaatggatgttcaggagctga

SEQ ID NO: 13358 - DNA, 681 bp, Gossypium hirsutum
tagctctgggtttccttcatatatacaaggatcattgaaagtttggaactgttacctgttgggatttggccccataacttgttgaacgacagattcaaatagttcaagaaagtcattgagatcatgctaggaggaattgggcctgaaagattgttgtgtgagagatcaagactctccaaccgttgtaagttcccaatgttctccggtatcttcccactcaaatggttccacgacaaattcagagtgaacaatgctgagagctttgttatatgatctggtatctctccttttaaatcattggccgatagatctatgacattgagcagtggaattatctttgtgtattcagtttgtctaccttttgagacaatctccacatgctcacggaattctatatgcagagttgagggtagttcatcgaaataaggacccaggtaagtaaaagttttcaagttgcccaagcatttggggatggtccctgataacttgttttgagcaagatctatgatgtgaagagaaggaaattcacagagttgttcaggaatgttgcctctcaagaagttggctcgtaatgccaagtaggttaaactgaacagatgagctgaaactaagtctggaatggtgccagaaaatcgattttctccgagatcaatggagaacaacctagagcagttctgcaag

SEQ ID NO: 13359 - DNA, 613 bp, Gossypium hirsutum
  misc_feature (47)..(52): n is a, c, g, or t
  misc_feature (469)..(469): n is a, c, g, or t
  misc_feature (488)..(488): n is a, c, g, or t
  misc_feature (581)..(581): n is a, c, g, or t
  misc_feature (602)..(603): n is a, c, g, or t
  misc_feature (605)..(607): n is a, c, g, or t
  misc_feature (610)..(610): n is a, c, g, or t
gattttacaaggctaactaattataactcctaatatatctacctcgnnnnnnacaaaattatagttacttttagcagtttagattctgctaagcttatgaattcaggtttggtttcagtttaataagtttactcttaataattatattatatgagctttaacacttgcatgtgatcctcttcttgctaaatttttttctcttattatataataataccactacttcttagctctaaacatgcatcaactttcccgccgtctttaggatttctattcctcttattcttttttgaacttgttgattatagtttcattttatagcttgaatcatcttgcacaatagttcagtttgcaagcaagagattaatttttcttataatactttttttctgatgaaggaggtgacaccgccggcgataacaacaattttatatgaaaagggcggagccgatgaaaaaagattataatnatttccgtgcagcgtggangatgatccccagcttgatcacttcatggtcttccctttccttcctttactctcaaaaaccatccatctattttcatgcctttgtttgaatccncgacttgaaattttttgaagnnannntantgc

SEQ ID NO: 13360 - DNA, 556 bp, Gossypium hirsutum
tgttggatgatatcggcagaggccgaaaggggcatacatttgtttaaccttcttctacaatttcattgacaagatgttcatttttattgctgtttgtttttatgacaaaaatgtggttccaattaagattgtatcataggaagtgattgttttactatatttagagcatttctccttttagcaataggtgcaaacactttatggtttggttcaatgctttcttccccttatcttataaataaaagtgtcaaatttatgagacaagagctatgttttcttgtttttcataccttgaaatgatcactggttgatcacatacaaatggatgatttaatgtcatgccattatatgagtaatcgtttctttttttgaattcaatggtgtttacatcacaatgaatgacctttttttcctttgcagccccagttcatgcatgttttacacttcaaaaaccagtttctgagcttgttgatcatattcaaaagttggagtatgatatctatgaagaaataggtgttctggataccaaggtttcggtcttaacttctttcgtcac

SEQ ID NO: 13361 - DNA, 643 bp, Gossypium hirsutum
aaaagtccctagcatgagctatctcaccactccgagcctaccccctgatcattgtattccaggtagtgacatctcgaaatggcattttgtcaaacaatttcctagccatgtccattctcttacattgtacatagcctgcaatcattgcattccatgaaacaatattcttttgtggcatttgctcaaaagtttccctagcttcatcaacctgtccattctgcacataaccagacaccatcgctgtccatgtaaatacatcttaaaccggagattcattaaacaatctcctagtttcttcaatctcatcattttgtgcataaagtgaatgtttagttgggatgataattttttttttatgaaaataaaatacaaaattttatcctaaaagccaattttccccgatttaaaaaaaaacaacaattgaattttttttgttaccatggtaaaaaaaaaaagcaaaatgacaaaaaaaaaaaaaaaaaatgcctacaataaacaaataaaaaaatataaaaatgtcttttttgtctgtcatggaaaaacatgaaaagaaaccatcattttgcaaaaaataaaaggaccaatggttttttttttttttaatttaaaaaaaaaaaaaaaacattgggggggaaatttttca

SEQ ID NO: 13362 - DNA, 511 bp, Gossypium hirsutum
ccctgtaaagaggtgttaaatccccttacaagctgctgtcaactttaatcaacccaaagaattggctattgaatgatacaacatagaagtagccttaaaatatagaggaatgtcaaagatgcggtagaagatgaagtatacatttaaattcaagccattttggtaggaatttattttaaaatacatatgtggactcccacaaatgaagctaagctataaaatctgtcctaatcccaaccaaataaccaaccatccaataaatgcaagcatccagtagctaaaaagacccaactcgacagcctagttattgcctaacatcacaaagagtttcagtcttgattcttttataaagaactattttaattgtaaaaccttataaatatcttttatgatccttgacaataaacagaaaaattttgcagaaatgtataaatggcatgactgcatcaagaaaatcaaaatttatcactaaaaggaagagacgggggaacctttgactcttgaggctact

SEQ ID NO: 13363 - DNA, 593 bp, Gossypium hirsutum
tgaccaatgtaggaccatataattttaaaacgaacactcaaaaactaatccaaaatctaaaattgtccaaattctccaaacacaagtctcaaattatcaaatctgacctcacagtatgacaaaaccataattagatgagggttgagaaaataaggttattgtattagaagctcatacaacccagatgaaaaagaaatttttgttctaaatcttcacttaaataagtgttcttcaaaattttggaaaaaggccttcatcactagcatcttagatgtaaggcacttgttttggggttgggggatggaaattttaccggacaacaaaacaattagcttgtgagaaaaatacccagcacttaaaaaaaatcaagtagcaaataaatgacagagaaaatttcattaaccagaatgggaaaaaaattatagaggtttttgacactctacagaaaagttcagaattcactaacctgtacatttaaataatgccacactggatctgactcaggttcaagctccaacaacaaccttactgtattctcaagctacatgagacaacaaaatatcagaaatacttgtcagtccttacaaactgca

SEQ ID NO: 13364 - DNA, 605 bp, Gossypium hirsutum
  misc_feature (59)..(63): n is a, c, g, or t
tcttttcgttaagaaagagaggatgtcttcatcgagattggtgtcgatacaccgttccnnnnntcgaaaccctggagccagcttccaaccagggtcaatagtttcacctactcaattttgagaataaggatcttcatataagggagctgaaaaagaaatgtttctcccttttgttttgaaagaggaacttgatcggcatctaaatttgctcccgagatgtcgcgaacgtaatcccgatgaagctgttctctcttttttagactccctttctttgggaggaattggaagacgagttaaagtctcccgatgggggttgcatgcactcacgctatatcgatgaggttcatatacattttataagaaaaatggctaaggatatcattaagatgaggggcacctcgaactatttctataaattgcttatcttatggaatattttagttagattagaatataacacttttttttttttttttccgggccaaaaaaaaccattttccgggaaattaaaaattttaaattttctttaatttcaaaaaaaagggaaaggggaaaaaaaattttttaaattttaaattttttttttttccggccttgccttcccc

SEQ ID NO: 13365 - DNA, 652 bp, Gossypium hirsutum
tatagggaccgaagccaactttcttaaggatcatccaagaatatgctgatttggatgtgtaaattccgtgcgggttttggatccacattttggtatctttgatgccattatgaggaatgggcaaattacaaatgcagtccctcatattttcaccataaatctcgatcaccctttcccttttccacctcctattattgtggtcccacaaatctttgacttttctttcttcatttgtgaaccgtgaccgacaagctgaaaccccattaacaccttcgatgccccagtgatcccggcgcaaatcaataaagtttccatccccaatctgccacaaaaaaccatccttaagggcgtctatcgctttagcaatactagaccaagtgaaagacggcttttcaatattttttggtctgagcacgtcatcctccggaaaatatttcgcgctcagcactttaaaacatagagtatccttaaactacataagcctccaaacctgtctaccaaggagggcgatgttaagcagatgcatattcctaaatccgatacccctcatccctttcggatagcacatgcgttcccaagccaacatgaaccagcctcgagttttttcattgttggtccaccactacttacacatcttcgcatgtaatttctc

SEQ ID NO: 13366 - DNA, 665 bp, Gossypium hirsutum
atttaggcagagcaggctggacattggattctgctcaatagtaaactgtgtataagcggagaattcatttaacaccgactccaaagtgtttccatcaggtaaatagatatactcgtccacatcaaagtagaaagtccaattggcagcgtgtcgatagcgatgcaaacaatcattcaccaccaaaaactggttataataatacccatcgaactgctcttggtcccgaatgtcttgaatcgtagcccttccggcacgcacccaaggttcgagagccgctctgacctccggggagaccccgcccgcatcatgaaacacgaaatgcgagcttgccccaaagaaccaggcgtggtaagccatccattctctcatcctgtcagcgctgaggttcccgtacagagacgacccacagtacaaatattcgtactgaaatggtggccggtacttggcggcattgtaagatccaggggtctcctccaacgctgtgaacctctcgtacttccttggggactcaccgtagtaggcattgatcatcagcttaccaccaaggttgtcttggtttgggttgactgggaaagtgcaattcaccaccaccacggtgtaaacacgcccatacccccaatccggaagcattttgtaggccttggctctgaaagatgacccataat

SEQ ID NO: 13367 - DNA, 716 bp, Gossypium hirsutum
  misc_feature (687)..(687): n is a, c, g, or t
tgattgtgctaggatttcagtgagtaaatcttgattgtgctaggatttcagtgagtaaatcttgtgtttaagttgaaagtagagaatatagttgtttatttatttttaaattattctataaattgttttctgatgcgctttgacaattttacttgtatagacctatatgttcaagtacgacagtgttcacggtcaatggaagcaccacgagcttaaagtgaaggactcaaagactcttctctttggtgaaaagcctgtcactgtttttggcatcaagtatgtttttcttttccttcgaacgagattattttaggatgagttttctgttgttgaaatattttcttgacgcccttatgtgattgatgtagaaaccctgaggaaattccatggggtgaggctggtgctgaatatgttgttgagtctaccggtgtcttcactgacaaggacaaagctgctgctcacttgaaggtatgtgataataattttgagcaatgtttatctcatggtcgtttgagagacttcatttgaattaatatgccttgtgtgtttatcaaaactgaagaggaaaacctgaaattttatccgtgtttgatacatattcgagcatgtgtatagggtatgatcctccaaattatggaaaattttagaaaaattgagtataccatggtcagcacatgcctgtatctngtataccatggtcagcacatgcctgtatc

SEQ ID NO: 13368 - DNA, 654 bp, Gossypium hirsutum
ctcggaagtgacggtccaagtttggctaacaaatgggttttgtttcaactcggtccgattttcacccttggtctacccaaatatatagaagatcttttactccatacatttccattaccatcttttctcgttaaaaatgattacaaaaaattatacgatttcttctacgaatcagccggtttagttcttgatgaagctgaaaaaatgggtatttcacgtgacgaagcttgtcataatcttgtattcgctacgtgctttaattctttcggcggcattaaagtgttcttcccgattatgcttaaatggattggtttagccggagaaaacctacacctttcattagcaaaagagatcaggtcggtcattaaatcaaacggcggagaactaagcttgtccgcaatggaacaaatgccattgatgaaatccgtggtgtatgaatcgtttcgtatcgacccgccagttcagtttcaatacggaaaggcgaagaaagatcttttgattgaaagtcaccatgccgtatacgaagtgaaagaaggggagatgttattcggataccaaccgtttgcgacgaaggatccgaacatatttgacagagccgaggagtttgtacccgaccggttcatgggtgtcgacgaggagaagttgttgaagtaa

SEQ ID NO: 13369 - DNA, 650 bp, Gossypium hirsutum
  misc_feature (17)..(17): n is a, c, g, or t
  misc_feature (629)..(632): n is a, c, g, or t
  misc_feature (635)..(640): n is a, c, g, or t
cgccatgatgttaattngtcagggaacctaattctatagaactttcaatcgggtagtcttcaaaatcacattaacatagcaactaaggtgcatgacactagctcaagcacttacaagaggtaagagtactttgagtggctttgagcatctgtaatcaagtgccgatgccatagttacaacagccttaagtcttggttcccttccttcagaaccttacaagatgatatgtgacacacaagcaatggtgagttttatcaacatcaagagaaaaagagagcaagccaaatataagtacattaaaatcaatattaacaaatggtatttgaacaaacaagtcaagtttccttcagaatatatcaaactttatatgcaggcttactgctgtctagaattgtagcagtgataatgcagtggcacttcgatacaacagattgagagtaagctcatttctgtaacagtggcactatatgaactccgagggtttaattgctcttattttaattggttattaaataggtgatgatgcataaagaatttgtacctcttaaacattatagtttgtttcttccgctaattatttcaaatctaagacagttatatattttgagctgataaattgataatttgannnntannnnnnaagctcagcc

SEQ ID NO: 13370 - DNA, 468 bp, Gossypium hirsutum
agtagtttctgagtacaatgatgtttcatgacctcctaattgttgatatcataaatttcaatgtttagttactcgtattgggtcaactagataaaaaattcagtgaaatgagtgtgagaatgttcactggcaactagtttttgctgaacgtatattatattaaattgagatgcttttttcttttaaaactttttaggctataatttagaaaaaaaaattctatattactattaaaataaaaattaatgattttcaaaatgaatttttttaaaattttaaaacagctttaaattatttttccattttaggctattttaaatattatgttaatttttatccaagccaaaacaagaaagtgtcttaattcaaaaacgaaccaagtaaaagaatggataatgattcaaaaaaaaaaaaagggaaaggggttttttttttcaaaattttacggtttccaggggaaaaaaaaaa

SEQ ID NO: 13371 - DNA, 698 bp, Gossypium hirsutum
cctgccgtattcacataccactaatattattccatatttgaatcgttttttttggatgattttttttttaaattaatgtattcaactatagtttttttatacaatttctaaactttaaatctttatcacgtgattaaacgcactttcaacctacaatctctatattaccataccaacactccatttgaatactcatgtttgactaaggtttttaatatataaattaggtatcatcaaacaagtcatctagaacctcaaattataaattaacataagaaaaattatgctttcacccctcctcaaaatgcaataacttttatttaattcttctaaaaattataaaattataagttaatacgtaataaaatttatatttaatgtaaatccactatcccttgatctcaacccaacattttttctattaagaaaaaactaacgtggcaataaactgttaataaaagcgtgatacatatataaaacaccatatcaaaaccacatcttcaatttcaagtcataataaaagagaaaaagaaaaataatgcaaagaaaaatccctaaattaaaaatttcagatttttattaattatataaatatattatgttttattttttattttggaaattttaataaaaaattttaaatttgacttctttttatattaatgatatgattttgatgttgcgatttgcactttatt

SEQ ID NO: 13372 - DNA, 422 bp, Gossypium hirsutum
  misc_feature (362)..(362): n is a, c, g, or t
  misc_feature (369)..(370): n is a, c, g, or t
  misc_feature (378)..(387): n is a, c, g, or t
  misc_feature (391)..(405): n is a, c, g, or t
  misc_feature (408)..(412): n is a, c, g, or t
  misc_feature (415)..(418): n is a, c, g, or t
tgatctttatctctttctctttcccttttttttccctttcagttccttttcgaactcttactttgtttctttctttatgttaattgcagttcaagactttctctcagagaatagatgatattgatattaatgtatttagaagcctagaaaaaatcaagtcagagccctctcaaggttcaactttcctttgtgattgccttatcgagtggagggtatttgtttaatttcataaactttttttttctttttaacttctttaccttgttaaaacccttttttttttatatatttttaaaaaattgaattcaattacctccttctttgttttttgggaacccttgttggattatctcttcaaaaanagggaannataggctnnnnnnnnnngagnnnnnnnnnnnnnnntcnnnnntgnnnntttt

SEQ ID NO: 13373 - DNA, 376 bp, Gossypium hirsutum
ctcaataaatttggttaatgtttcaattacactatataaaaaattcttattatttatatcttttgatatataaacacttactgacatgacataattaagacataaattcaaatatcgaattcacaaatttatagataattaagttataaatgagatattaaaagattaaatgaaaaaattattatcacatgagacacaataaaattattaaaccgaagtgtttggataaaaatatttgaaatattataaaaacaaagagataaaactatatatgcacaaaaaactaaaatcaaaatttaactataataaagaaatcagataccactcaatatctatacaattgttctcatattgaggcttgaattaagtgaatccc

SEQ ID NO: 13374 - DNA, 552 bp, Gossypium hirsutum
tgttagatacacctcacacccttttcaaacacatttttgagctgacaaagcataaataatattggtggcgttatcaaattacaaacgataaaaaattattccaacttcaattttgaagttctagtatctaaaatatatgctagatatgcctcaaaccctttttgaacacatttttgagttgacaaagcaggaataatattggtgatgctatcaaatctatctaattcaactctagctgtttcactattctgacatttcaatacaatctatttttgtatatagttcacaatgatgtcatgcaaagtcaaccaatccatgctgagaattacatcaaaatcatcgaatggtaataacatcaaatcagccaaaaagtcacaatattgaattttcagtggataatttttacacaatttatcaactaacacatactagcctaacgggttagttactttgactacaaactcagtcgactctactggtatattcttatctgacacaagtttagtgcatatatatatgaatgtattaacctcgggtcaattagagcacaaa

SEQ ID NO: 13375 - DNA, 622 bp, Gossypium hirsutum
  misc_feature (564)..(565): n is a, c, g, or t
  misc_feature (567)..(567): n is a, c, g, or t
  misc_feature (569)..(569): n is a, c, g, or t
attaggaggaagtgtggttttatgaatgggatggacgtaggagcagtaggtacgtggggagggatttgcctagcatggaggaaagaggttcaggttaatcttagaactttctcaatgaaccatattgatgtgctaatcaaagaagaagatgttgatgaagaatggagatttacaggtttttatggatcaccttattcacagaataaaaaggcctcatgggatctattaagatttttggggtaggaacaagatctttctttgttagtgagtggagactttaatgaaataatttactcatttgagaaaaggggaggtcaaccgagggaggagaagataatggaagagtttcgcgatgtcctaaacgaatgccaacttattgatgtgggctactcgggaacatggtatacatgagaaagaggaaatttaccggaaacaaatatcagagaaagactggataggggtgttgcgaatagaaaatgattggaacttttcccagaaggaaatattcatcacttaacgtcttcacttttagatcattgtccccttttaataagcacaaccaannanancagtttcagagtagccccaagttttaaatttgaagcatggtggatcacagagg

SEQ ID NO: 13376 - DNA, 616 bp, Gossypium hirsutum
actttgatggtaaatttataaccaacatttctttatcatatgtcattctcttccttatattagtacttaacattccttccggtcactgcttggaattgtctttaaatagatttcaggtaccattgttgctccaaaaaaccccaatgtctgggatggtttgaatcctcgcaagtggctttactttcatgaggttaaacacctacatgtagttgggggaggaactatcaatggaatgggacaacaatggtgggctaggtcttgcaaaagaaagaaaacaaatgtactgattgatgctccaagtttctgtatctatgtttattttctgatattattctctgaactatccttaaagtggctttgatttcctttttgcagccatgtcggcatgctccaaccgtacgtcctagttagtgccatgtatcttcttttttactagcatgcctcagggaatgttatgttcccctaattgttttcacaaatgaaatgtaggctttgactttccacaagtgtaaggatctgaaagtccatgatcttatgctggtcaacagtcaacagatgcatatagcattcactaattgtctaagggttatggtaatctatcctaaaatgaaaaaaa

SEQ ID NO: 13377 - DNA, 654 bp, Gossypium hirsutum
ggaggatgagatacacaagtggtgaattcttttgatagatactagacatcaaaacactgtgaaaacaacatagagatgggaatatactgactttttcattctcttttcacagatcatttttcaggttttaaggttggtatcatatattaagtttaatagttttcccttttttcttttacctggtaagacgtcatcgaaaactttatcaacatcacatgtaaatatgccaactttatataattcaattttggggggcatacagaggaatttggatgtggcatatatgtctcgtatcggaaggttttcggaggatgatgtgtatgattatttatgaaaagtataagaatgtagtttatcgtttggtaagggatttcttgcccctattataattcattgtcggccttcatctatgtattttccttttcctaatgaaaatgacagcatgcatattattcctttacttgaaaaattcgataaattaatttttatatattagatcaaaaaataaattaatttttctgtaaaagttcttattcatttctaatgttagtgtgacatgcaaagcataccttactctattgtacaaaggttaaattacccatttttattttttattttgaataaaagagacaatacaattggactcttaccggg

SEQ ID NO: 13378 - DNA, 643 bp, Gossypium hirsutum
ttggctttccggatgaacttaatgacaagctcatagttttctagcaattctagccatcttgtttgtcttatattcatatctttctgagccattcgatattttaagctttttttatcggaatatacatgacttttttcaccaaacagatagtggcaccaaattttcaatgcgaatacaataccagccagctcaaggtcatgggtcggatagttcttttcgtaaggcttcatctatctcgaggcataagctatgactttgccttcctgcatcaaaacacaacctaaaccattcaaagatgcattgctatagattacaaattctttacccgattctggctgttttaacaccgaaacttcagtcaataagactttcaattgatcaaaacttttctgacactttttagaccattcaaatttcacatcattttgaagaagtttcatcaacggagtcgcaatcatcgaaaagccttttacaaaacctcaataataaccagtaagtccaagaaaactacagacttcagaagcatttctcgtaggtttccaatccaaaatagctgaaatcttactaggatcaactcggatactagatgtcgacacatcatgtcccagaaaaccaacttcgcgtaaccagaattcacatttgc

SEQ ID NO: 13379 - DNA, 680 bp, Gossypium hirsutum
caggtggtaaacccggtaattcttcaggaaaaacatccgggtattcacaaaccaccggcacagattcgggtttcttttctaattctttgtcatcaagtacatacgcaaggtatgcttcgcacccttttcttacatatttctgggccaacattgatgatattacagctggcaacccctccaagtccgtagactcaactcggattatctcgttatttgcgcacctcaaatcaatagtcttgcttttgcaattcacaaccgcatcatgcgcggtcaaccaatccaaaccaagaataacatcaaattcatcaaacggcaaaagcatcaagtccgccggaaaacaggaacctcgaattactaggggacatttcttacacactttgtcgacaagcacgtaacgacccaagggatttgacacccgaattacgaactcagtagactcaataggtaaagtcttactggatgctaaggtttcacatatgtaagaatgagtagaaccggggtcaatcaaagcaatcacattagtatcaaagagagtaaaagtaccggtaataacatctggcgaggaagcatcctcgcgggcacgtatagcataagctctagcaggagcacgagcctcggatctggtcgtagcatctctagatcctctctgaccaccactagcattgcccgtattcctagat

SEQ ID NO: 13380 - DNA, 636 bp, Gossypium hirsutum
ttgttctttctcaaagggatcgtattgaccctcttctgagcctatgggagaagactgggtagaagaagcttttagccgctgcttgttcagtgctatttcccggtcgtccaatggtctttagtcgttattaagcctggtatgtctccgccctgtgtccacaattccagaccttcaatccaagatcatgccttgggctggattagttcacattttattgcttagttcgcattccgggtatgtggaaagcaagaaaaacgtattcgccatagttacgatatcctttgctgaaagtactattattctcttgacttaaggggcagtaagtagctcaccaatttcgggtgtacgcgtcccgtagtctaactggtactcatgtcttctatagcagtatggtatatgtaacgttgttggttcaaggttgcttaggactgtcaggttgctagtccttcgatggttcccaaccccttttctcaaaaatcccatttccttccatgtgggaaaaatagcacctccatttctatttggatcaccactattaaggaaatgtagaagagtatgaaacagctcaggccatcccaaaattcccccttgttgaataacatttgatatagtcgtcccacaagttgacctaatgtg

SEQ ID NO: 13381 - DNA, 425 bp, Gossypium hirsutum
ggtggagattgagagtaattgaagctctcataataattctcacattaaccgaactcttgtacgtttgtttgatccatgctggtctatttggcagtaggtatggaccagggtatctagacaccgaatatgagggccagccggtgcctaagggcggccctgctgtaacagggtctagggtttgaagtaccatagtgttgaactggaacttgccttttttaaaatgtagttttgctttgtgaactctttgaagttccttctatatttgttgctattcgctgctttgtatctgttgtgtgtattgcttaatgattcgagttagaaagtaaatgagagagtgtagaactcctgtaatatgagacttggcagcattttctgtaggggtgtgaaaaaagatattctaaaacccgaccgaagtgaatcagacc

SEQ ID NO: 13382 - DNA, 440 bp, Gossypium hirsutum
cgagcatgaaatctaccattagcaacatgtccaaaaaacactatctcatggtctcctagtgtgcaaagtcactgagctgtccaaataatcttccagtcaggcaaacataacaggcattttaacaaacacctagtgtgctatgccgttttttttttctttcaaaatcgattacttcacattgaagcatggaatctaccaccgtacatcaacagcatgacatatttcccatttcgaaatgagccacggagatatgaaacaggacgaattaaacactgatgtggaagtaatacgaaccgtgagaattgtcaggacattaccaaaaataacttctgtctgaaacgatgaagacaaaatggtaaaaaaggttaccgccaagtctcccgttatgtcttagctatatatttactattaacactgtttgataagagatatattaattt

SEQ ID NO: 13383 - DNA, 600 bp, Gossypium hirsutum
ctcatgggtgttagtggcgctggcaaaaccactctgatggatgtgcttgctggcagaaaaactagtggttatatcgaggggaacatcactgtttcaggttttccaaagaagcaagaaacatttgctcgagtatctggatattgcgagcaaaatgacattcactctcctcatgtcactgtgtgtgaatccttgctctattctgcttggcttcgactaccggaaaaggtcaacgctgaaaccagaaaggttggcattcattgcatcctaagccttttcaagtttctttctctactttgttacaagttagaggtttttactgaggcaataacacattaatgatcctaagagcagaggcaaacgaaataacgctttttcctaatgatcaccgtggcttgaattatattgatgttttatttcaccgtgtgttattagatgtttatagatgaagtcatggatcttgtggaactgaatccatcaaggcaagcacaagtcggtttacctggtgtaaatggtttgtcaaccgagcagaggaaaaggcttactatagctgttgagcttgtggctaacccctctatcatcttcatggatgagccaacttca

SEQ ID NO: 13384 - DNA, 652 bp, Gossypium hirsutum
tttaatcttcaaggaggctaaggtggtttctttggagaagagtggtaccattaaggaagtggaagtaaatgaatctgaaaatgaatctcaatgtccacaggaggaagtttcggagatcaatgtgttagaaagatatcaggaattcctatctgtcctaaatgaagaagagaacttgatggaaagtagcaaagtcgtggaacaaataaggcttttgctgaaagatgatgaggaggcccggatttttatgggggctaatggctttgttgaaggactattgcgatttctcgagtcggctgtgcatgaaggaaatgcaatggctctggaaattggggcaatggctctgtttaaccttgctgtcaacaataacaggtttgttactcatgttttatgcctttgctttgttaaacccagacatggatatttgtgagcaatacagcctcttgcaagctgctgctactttctgattcatcgaaggatgcaccaaatgcatcattgttggacaacattgttgtgtcttttattttagccctgttattcatatgattgatcagcattttatatgcaattatcaatatgaatcttttataattttctttctcattctttttaataaatatatcaggaacaaggaattgatgttagcaggtggagt

SEQ ID NO: 13385 - DNA, 462 bp, Gossypium hirsutum
gatcatctactttgttctgacccttcttttttcttaaaaatacgaatgtccaatgcatatccatacacgagaatcagaatatgaccatccaagaaccctctaaatacttctatccaacactcgcacactcaagtccaaataacatagtccatcaccattaaattaatttgtctagccaatatacatttttcaccgagtatgtaggagaataatcgataggcaaacagaaatgctaataccaacaaaatgaatccgatttctgtgattaaaattgtactaacatacagttcactgcatggaaattttgtcccaaaactaatttgcctctttctcctaaaagagcagatcccgaagggaattggggtaccatcgcagtttgcataagaaaaaggctaaaagaatcgagccatgtactacaatgattctataagaatgtaaaaccactcttcccaatagcatgag

SEQ ID NO: 13386 - DNA, 641 bp, Gossypium hirsutum
gaatagcggtcactgagcctttcaaagaaatctacccttcaatgagaagatgcattctacagagccaaagaatcggaaatatattacctcctgattaacatcatctttatccatctgaacaaaaacttttgatccctgtctttgcagactagaactcctaaaagatgatgcaggctttctacggaatctttgcaagaaaaacagagggctcttcccggcacccgaagatgaaacctgatccacataatatgctacaaatagaaccacaaaccactcaacaagaatgataatcatgacctcactcatcccattagagctatcactcaaatccccccaccgcatcccatgtgtgcccatataatttccttggaaagaatattctccaaactcatataatccccgatacaaagcaaatccaggaaataactccattacaataagccagcctcctacaaaatcaaaaaaatgagtctcatagtaagtatggagaaaggtacaagtgaagatggtcagtttaaatgaataataatgaatctttagagattgaaagaatctacttctagaaatgtgtcacaactattctaagtttacagaagccaaatttattattactacagcctctgggatagaattcatttctc

SEQ ID NO: 13387 - DNA, 650 bp, Gossypium hirsutum
acagttaaaccctaattcgtataaccataaatgcaaccattctaacaggacttgtaatccgaaaaacatgatagaagcacatgcaagtgcacaaaaccattccaacctaacagcaaagaatgatgcttttgagttttaaaataccaggacagtaaaccgtgggcaacttaggatcaaacaattaggatgagcagtgtcattctgtacaaattggatgcttaaagcattggaaactaggacaaaacagaaacttgcttcctatcatagatatgaaccctatcattaatcattcagtaaatggaagcaaagagttttaaaattatactcatacaaaataaacagattcctttttatgataaccaaaaccaaacaataaaaacctattcaatcatacttcttaaaagagataaggtttggctggattttctcccaacatagatatgagcaccatccatggatgcaaagaattgcttctttgcttaattctagcattcatacaagtaaacagacttgttcttactacaatcgaagataagagaaagcctattcaactatgcttattaaaaagataatattcggctcgattttgcccattcaaatccaataaactgaaagaccttaaaatgccatcaatgaagcccaaagtactc

SEQ ID NO: 13388 - DNA, 453 bp, Gossypium hirsutum
tttgttttatcaacagcccgtcgtccagacaacagttcaagcagcacaaccccaaagctgtatacatcactcttagctgtcaaacgacctgttcaacaatggaagcttcattacatgtaacttctgacaagatataatatgcaagcttcattaggaatcatctcatggaaagataatttatctgagtgcctactttttttcatgcaagcagtttgcatatgaaagaacaaagaaaatagttgctttacataagtatcctagttttggaccaatgactaaacagacaattgcactttagataccttcacagcaaccagattaagatttaattttttatttcagcaacaaatatctctgatagtaaactaagatactaagaacttatgagcaatcttcagaaattgcaagcagcattatggggtttcaaaaaacctcctaccgggagcaacaaaa

SEQ ID NO: 13389 - DNA, 657 bp, Gossypium hirsutum
tcacctttagcttgcactatcagaagctttttttttgttgggttatggtttttgttggtgagaaaagaggggtggtttttgagagaggaaagggaaggggagtaatgggtttttggagataaggttagaggaactgatagtgaagtgacgggattgaataaaagcatcttgctttgaagttgtctttggatgtaaagtggagaagttgcagaataggagaagcaaagtccagataggaaaagagaaaggaaaggatttgtaaggtctcggtgaagaggaatatctacttagaaggaaaaagaaattagataatttgtcaatatctttctaaatatatttaaaatattgggttttaaaaattgaataaatttacataagtaaatataatatttgtaatcaacttatgcgtaatccatgtatttaaaatttgttaatgcaaatactcttgaaaaagataaataattagttatgaaatatactatgaacagagatcaaaccctaaaacgtaataattaaaagataatataaataattattacaccatatttcatgattaaatataacacaaaatacaaatacaaagtggatatatttctctttgggataattgtgagtgggtaagtgaaaaaaaaatgttggaagagatgcagagtaaca

SEQ ID NO: 13390 - DNA, 634 bp, Gossypium hirsutum
gtttcccgcattaaaatttatatgaagtgaagaaaaatatcattgccaaaactggcttgtcaacgaacgatcaaaaaaaggatattgagatgtaattaatggagggttacaaggcaaaaagagtgattggttctgaagtgatgatggagggaaatgttaacaagaaaaaaggggtctcaaagagttaaattctggggggtttatagaactgtctgaagaagaacagaagagagacaagaaaggagataaaggggagagtgtcacatgcctgtcacatgggtttatatcggtaatcagacggtgaagagagatggaagacgcggtgaaggtggcgattgaagtgatacaaaggtatgattttttcgctgtgtactacgatcatggtggagcaggactcgctaacgctttccgtgacaggatgcaccggttggtggtaaaggaggtgcaggaaaggacacgtggtggtggtggtggaggaaagggagtaggatgggagaaggtgatgtcaacttgtttcgagaagatggatgaggaggtcaccggtgttgagtgtgggacaacgactgcagtcgatgaggtcatggaaacgatgggatcaacggcggtggtggtgttggtaagcagggaagaagta

SEQ ID NO: 13391 - DNA, 669 bp, Gossypium hirsutum
ctgtctttaaggcaatcacccacaagcttttctcttttgctctgtttagaaaagctcatattgtgggtgtatttttactcatctttttaggaattcgctggtcaaacaatgacgcaggaggagcagaaacatttgctgcatgggacactttctgcaacaatatatgggatagatgagctaccatttggatgtagagagaatttttgcctccaggtaaacctgtactatttagggactatttattagagctgctttaaaattatatcatgtctggaataatttctcatatcttatgttatccattcttttcattttagtttaaactatatctgttctaacatattcgaatttaactgtaagagaatggtcctttaaatatacataatacgaagatattacaatgtcttgatcacgatattacagtgatttataacacgaacacattcttaactgtttgattaccatgtcttaatgttgaatgtaaacaatactaatggacttttttatttttatttctaaaggaattaaatcctcgtgctattgttttctttaaatgtaggggacgatgaccgcaagcaagttccagaaaaaatgtctcgccacattcaagagaactgtaaaaaacctgccatacgcttccacctttcgctcatctcgcatgctctgaaa

SEQ ID NO: 13392 - DNA, 677 bp, Gossypium hirsutum
gtgatttggatcctagatggattttcggagctttgcataaaagtccaacaccacattattgacaaatggcttcacatatgtaagagaagtgagtagttggttttactccaagaaaattttgattccattctcgtaaaactcatcctctttaaattgtttttcaagaatgaatcattttttagcaaccactttcctcgttttggcataggcatggttgaagaaccttttcttaggttgaactgattctgattggcttgctcaacaactttctgtagaatttcaagtaccctagcttcctttttcaacttcttgtttcttttcttagagaatgatgatggaaaaatcagtttagagaataatatttgtaatatagccgaactttaaaagatttcttaaaattgagacttgtggcatttatattaataaatcttagattgaattattacttgtgctttaagcaatgcggtctagacagctttttaattctcccaaacgatttttttcgctatcttcaaacccggacttgctttgattaattaaaaaaaatatgttagaagtttatatatgttaccattttaaccacttttattaacttaaagttgaaggataatcaatcatccagtttaacgttattcaactttgagtgagatttgttaaggctgtcaacgacgattagt

SEQ ID NO: 13393 - DNA, 575 bp, Gossypium hirsutum
ctcttatacacttgcccaaaatcttttcctgacaatttacgtcaatacttaacaaaagtttaagaaacaaaaatacaaccccgtcttttctagaaagaaatgctacaaagaggactagtacaaaccagaagagatactcaagttacaaagtggaatactttagcatccttatcaccaaaaaactgaaacaccacaaatcatcccatagatgtcaagcgcctttattaaatgattttttgaactccacatcttagatttctagggatgtcaggcacccaacaaagtaaaggataatctcccaacttcatattatcaccttaacaagcatctaaagcagagtaccaaattcattcttcaagttagtcacacataccttttaccaacaagcaaaatatttgctagcccttcttgcattagtaccacagccagatctgcactcgcaccaggatctgaaatatattaagcagtaattgcaaagttaaatcatacttgttaaaaacctttcaaatagaaaagtgatgcaacctaaatttgcattactgaagttgagacacagaagacaaactacagagcaa

SEQ ID NO: 13394 - DNA, 683 bp, Gossypium hirsutum
tgagctatctgctagttccagtttatagaaacaagaactttagttgagtactaagtttctcggcagcataggacaacaattattggaaattttaaacctacacatctagaaaaggcctcactgagtgtaaaagaaaccgcctaaacaagaaaaaccatggagaaaacaaatcagattgtgccttttgggaagatgcaaaacatatcctgaaaagtttgagatgcaggatagttaattcggtggaaaacaaggattgagatgatgggctattttcctgcaaagccatgatcatcgcacaacttataacaaccgcaaaatcaagagaacaagcagtccatttgatggaaccaattttgtgtaaactagttttttcaaaacagggaaaaatccgtaaaattaacttcagtcttttttataaaaaagtaaatatttggagtaaataaattactagctcgggaaaaaggacaaagatcagcagggtatgaagataaagcccattacacatcctttacagcattgataaaaacttgaaatgatacggtcaagaaaataacaataataacctgtgccaacctccccaaagcaaaggctgacatctctttgagctgtatatcaggagagtgaagcatttcaatcaagggtctgacagcacccctttgtacaatatgaacctgcaatcaaag

SEQ ID NO: 13395 - DNA, 638 bp, Gossypium hirsutum
accaagatcaaccaccctcttttttctataaattttgattcggccatattatatttctttctgcacttcaaataaaatcaaaccatagcgacccatatatccacacccaataaagaactgggcccaatctcatgcaaacaaatccatcagcaagagctacgcgtgccaccgcctgacctggaaaacattttgggttttgtgaaagaaacaaaataaagaaaaaagcttcaaatgttaataaatggagcaagtttcttcacgtttaaacatgtatatgtcttacaaaagtttagttatgttgtaaaatcaattagtactttccactcaaaacgttccaactcaagaaaactagtaaacaatacttctacggtgttgtacaattcaataattaccacgatccctagttagccacataaccatagcactacaattaccgtaaatttcccagtagtaacattgttgtttccagtttgttattgtccttcatattatggctcaagttaaaaatctttctttccatttggatgatgctggtgaacccccaatactaatacatgccctcctcttggaatcctgcacatttgtcctactcatcatacacccattcagatacactataacggcgactttctcggtca

SEQ ID NO: 13396 - DNA, 649 bp, Gossypium hirsutum
gattacaggcaattaaactagcacacaattaaggataagtttcccattcctaaaattgaagagttgttggatgagcttggtgaagctagagtattttctaagctggatttgagatctggatatcatcaaacccggatgtgggaacccaatgtacataagacaatgtttcgaacgcatgaagggcactacgagtttctcgtaatgccctttggcctcactaatacctcatctagttttcaagcactgatgaattcggttttcaagccattgttgaggaagtttgtcctagtgttctttgatgacatcctagtgtattcaaagtcatggcccgagcatttagaacatttgcatgaggtccttctcatcttaaggaaacaacaattgtttgctaaaagaactaaatgctattttggcacttctcaaatcgagtatttgagacatgtgttgcatgttggtacagtttctatggacaaatccaaaatcgaatgtatttcttcttggctggttcctagcttagtgaaggagttaagaagcttcctcgggctctctggatattacagaaagtttattaaggattatgaggtgatggccaaacttctcactgaattgttgaagaaaaatgggtggagttggtcagatcaaacttatt

SEQ ID NO: 13397 - DNA, 549 bp, Gossypium hirsutum
cacaagcctattatcttctccatgatgaagtttataaattatggacggatggaagaagaatattggcatttcctaatggaaacatccaagaggaaagaaatgaagaaacggtgaagctgctaaacaagattattgaaatggagatagaagaatttccatctcatatcacagaaaaaataaaatatacatgggagacttggaattcaccaccaagactttcatcagattctttacatttggacgagattgaagaaatgaatctcgacaacagacaagaaggttgatgtcaacaaagatgacaacctgattcacataccaacaaaaatttggtaatgttgaaatcatcatgatgaaagcaaccattaatgaagaagacaaaaagtcttaattaagtcttaatcatcattaaaacaatgatgatgtaaaaggtgacaaaagcagctgtaacacaagcagtgacaacaacagtcataaatgcaagcatgacacatggaatcaaccagagccatgcaaaaagaaatgaaacgtggaaacaaccacatccctgaa

SEQ ID NO: 13398 - DNA, 460 bp, Gossypium hirsutum
ctgtttcactggcttgaccttgtcaggcttcaggggaagcacaatgaccgtggttggaagcgcagatccataaacctttctaaagtcgtcaagtgtcaggtcatcaatccactcaggaacaatgtagccaagaccacagtgagggcaaggggcctcattgaaccgtatctgatagccattgctgaatacgtagggctgtgcactgatcagaaagacactcttgaatccaattcctgcaaagaaaacataatacatccttagataataaatcctcacatatattatggcactgtaatactaataaggtttccaagtcttgctctgttataatttccttttatttgaattttagtagctaaaaatgttaaatgcgaattatttttgtatgtcattacaaaaatattttatcatgtgttacaccatttctctaatttttttatgctaaaatatcaatggtaat

SEQ ID NO: 13399 - DNA, 647 bp, Gossypium hirsutum
gtcctagcacatgggtgaccacgtacttgtgtggcatcgacagaacaatttttcagcttttgtcgaagcctaattttttgcgtttcaggtacacactttgtactatttcaatgcaataatgctctcaagaccaccaacatctaaaaatagaatcttgaaagtcctataagcaaacgatttaccaaaattaacaactaaatcgagcaatgttccacacttaccaccgtaaaatgactatatggaagttaaacagttgaggcgaaaaccaccgattcaccacgttcacctacacaatcgttcacagaattcatcgattactcactaatatcggttattctaacattgcccaaaaattaaaatttaacgttaacaaaccaagtttttacttaccaatccgattggagaatttgaaacgtaaaagcaacaattgaatcaggaaaatgacaacaacagaaaagggaaacaaagattgaatgtgaaaacaatgtaggagagacgaaagggaaaaaaagtcagagagatttggggatttttagaagagagagaaaagagaaatttataaaaaaaaagaaaataataaaaaaatacaaggatattcccagaatcccttaattttctccactaacccactactgataatgccctca

SEQ ID NO: 13400 - DNA, 666 bp, Gossypium hirsutum
  misc_feature (659)..(659): n is a, c, g, or t
atgaagatgaatgagatgaagaggattcacgggaatcatcgcgattgtcgttgttatggtcatctccaaagaggtccacatcttgctccgagaaatccatatcggagattatatgcttttagttttgtctttcggtctctctctctcagaacgaaaggagcaaagcgaatttctgcgtttgaggttttggtcccttttttaatatatatattttaacagttccttttgatgtcgactcggtgtaaaaactcaagcgagttgactcagtctattacagtactacatttttattgggcttttatgaagcaattttggacgggattgggccatcttgaattaaatgaaaacttaaattactatttactgtccggtttgcttttgtagcctacatttggcacacatctctccccacgtctatgtaaaaccttcaatttgagctacggatttactgccacctacaccatgttttttactatttttggtaaaaaaaacaccttaggtgacttatgataataaaaaaaatattaattatacctatatgtatttatgtttcatgtttgtattttaaaatattataactttccccctcaagttgagaggtgatataaatttttaaccccccaaaaacatcaaatactcatgttgcttgattccaagtnctttagt

SEQ ID NO: 13401 - DNA, 596 bp, Gossypium hirsutum
  misc_feature (438)..(438): n is a, c, g, or t
  misc_feature (542)..(547): n is a, c, g, or t
aggtgaccaaatgttccctacttctgccatgtgtgaagtcatatccactgacccatcctcaccccccaacttggattgattgggatgggaatgaactcagcttgtggttcaaatttagtcccgttccaactataaattgctttctatttgctctcttatcccccaggatcaaactaagcaaagaacgtagagaacaaaaaaaatggaagcttgctttctctcatcaaattccttcactaaaagtcttgagattgtgccctcaatcaaggctagatcacttacttttactaagaaaaaccccaacctttttcactctaggaaagtttctttcccatcttccatcacatgtaagttcttgaatttctatatatgaatcgtacttgtatatttacatatcattatcgtatacaccttgtcttaacaatctttacatatctnttcgtcgagagattttatgtatagatcgaatgttcataatcataatgtgccaatgataggctgccatttggattcatcttcaccgtcagatgatgacaagaaannnnnnacttgattctgattggcgttcatttagagcaaggctagtagcattagag

SEQ ID NO: 13402 - DNA, 651 bp, Gossypium hirsutum
catgattgctgttatgtctgctcagaaatgcttgagaaaaggatatgaagcttaagttgcttttgttgtaacaccccaaacccagcctggaagtttggctcgaatctggcatgtcacattgaagtgtttttcgaaaaccatgtttccattaaaaacccttcttaataattaaaaacttataccctttttaaaccttgttagaaacctcaactgaataacattcttaataactttgtaaaaatcttggcagttgcgaaagcttgatttaaaaataattgcggatacgtgatgttttgaataacagtagtttctttggaaaaccgtgttctaatactagcaattataagaacaataagtaaaatttcaaatttgaaatccataaaattacaacggctttactacaacccacataaaacatttaaaagtaataatcaaaactataaaataaacaatgtgtgtggcttcctccgagcccctcacagctccgatccatctaaggctggaaattacctgaaaggttaataaacggggtgagtttacgaaaactcagtgtgaaatcccctactataaaaaaagaacagttagtcatataaaagaattaaaagtctggccccaaccctacttacaattttagtatcaattaggccttaa

SEQ ID NO: 13403 - DNA, 475 bp, Gossypium hirsutum
  misc_feature (466)..(469): n is a, c, g, or t
tttctctcattctcaacacccttgacaccacttttaggtcaattagacccatcaatatctccatcttctcgaccttgtttttccctttccttaggcatttgtgagccctgccaaggtctttaagcttcatcttcttctgccatgtttaaaggaaataataattaggctaactaaatccgattacaactaatcattggaatgaatgtaatatattatattatatcagggaattttaattccaacttactttggcattaacttttttcacgagtcggacaagtgttgggtcaagtgaaccttttctcttccttccaagcaatgctttaatgatttgatatggtttctccttgtctgccttgagaaatttcatgaaggtttggattccatcttccattatcaccagaaatgaatctgctgaaattcttgagccaaaaccttcatccctttgatcatcctcgtaatctannnnaatgaa

SEQ ID NO: 13404 - DNA, 611 bp, Gossypium hirsutum
  misc_feature (549)..(549): n is a, c, g, or t
  misc_feature (551)..(551): n is a, c, g, or t
  misc_feature (555)..(555): n is a, c, g, or t
ccgccactcccagccctcttcccttaggtgttgtctgacaacatccctcctcccctaggtgccgcctaacgacaaccctcctccccttaaaattatcatttttttagcccgtatatggcctatattgtatcagtttttttcgacccatatattggtgccaccgtatgcctaccctccaccatttaaatatgttttttttttcaatccaattatggcctaataatgggtgactgttggtgggaaaaaaaatggtagtgtcgccgtcccttgtccctccaccccatgatattattcgtttcaccccattttagtaaataatgtcatgaggaaaccattttgaaatctaactaattcttttattattatcaagataaaaaaagcttagagacgaagatagatgtaactttatcatacaatgaataatagataattgatcacaaacaagtcaaactttagcggacattaatagagattgaaacttgaggagtaaaagtgaatggtaatggtatgatccccacttttgcttgtgtctattccactaattacggnangagngtgcaacagtattggaattatggttaggatcggaagtacaaagaaaagcaatagag

SEQ ID NO: 13405 - DNA, 662 bp, Gossypium hirsutum
gtagagagaaaggtaaacgggaaaatggggaaactatacttatgtcattcctgagtgaatattctttatataaaataaaaggtcacccataagaagtgttctcgccggaccgtagtcctcatcaatcaaagtctccgttggcctattccaatcctttctcccatctcccttgagaaaaactattccctactttcgcttacgttggtttggcctacgagtagttcttctcagcctccttacgcgttgcgttggtttgttagttcatcgttcgttcgcactcacttcttcccctcccttttgtcggattctcagtggtcaaagtagttcatgaatccttcgttcattgctgaactcacttgttagttagcgcatcacttcttctttcattagttggctattcctgaggtctattccaatctattaaagtcatggcttagtcccaccattagactgattctttagggcttttgtttaaccgctttaacattttaactattctcaagccaacaaaatattctattggcggcattcgtgagcaagagaaagatatgttggttaaaaggcttaggcctcctcccattcgtatggggattgggggtgcttctgtgcaatcttccatattctgggttggattcagcccgcttgcttagattgagccctaa

SEQ ID NO: 13406 - DNA, 669 bp, Gossypium hirsutum
cttatcaagccagtctatcataggttcacaaggatttaatcaaggttcatttccaagcacaacatcgatgcaatcaacatcagttcatgagaatggtgttagatcttcaacacagtcggatcagaaaacaagtgttgtaaagaaccccaagaaacgaacaagagcgtcaaggagagcaccaactacagttctcaccaccgacacaaccaactttagagcaatggtgcaagaattcactggaatacctgcaccaccattttcaggttcatcatattctcgaaggctggacctttttggatctggctcacggtccagtcatttggaacctttagcttctctctaccctttacgtccctcggctaaaagggttcagacgactccatttgtatcctcatcttcttctttacttgatgctgctaatattaccagtactacaagcgattcctccgttaatcctactgctttcaatcctagttctagtaactatcaactccctggtgatataggcttactaaaggagcctcataatatgtcaaacttgcagaaccagacccccatactatcgttccagtcctttctagaccctcctccgttacacccatctcttaatttgcctggtttcggtctgaagtcccagggaagctcagccatgccttccattgatgaact

SEQ ID NO: 13407 - DNA, 680 bp, Gossypium hirsutum
ctgattagtgcagatcaggagaaaacttctgggtttggtgggtgaagaatccaatgtcgctactgtccttggggcaaatttttctgctgggttttttgctggaagccttgctgctgctgctacctgtcctctagatgttgctaaaactcgaaggcagatagaggtttgtctccttcaaaagctaatggatggttcttgaatattgctacctgttgactttatgccatatgcattacccagttagtagttacttttggtacatattgagcatttttgttttacccctgtaagtacaaagttaatgaactagactatgctgttttatatcttctaaaatatgccatctttgttgtaattttcagaaggaccctgtgagggcattgcgaatgacaacgcgacagacactgatggaagtttggaggtatctttccaacccactgttaattgaattatgcatctttgatggagatattacgcatgcataacagggttccattttccaagcctcaaacttgccctatgacctttacgaataagttgtgaataaagctttctgtggcagcaatatgcttgagaaacgattttgtgttgatagaaatgaaaaaactcggatagcattaaacattgaattgcgtatgttcatggaatttaaattgttttatgtttgtctattgcttggt

SEQ ID NO: 13408 - DNA, 585 bp, Gossypium hirsutum
caagacctgttccccaaaagcttctctccctcaccatcgaaagttgtgaagtaagaaaggtcttccttttgcgagatccaatcccaccattaacatactggtaaaaagatatcaactaccccccattttcatcatcttcttcctcaaaaaccctaaaatatttttacagttctatttaaatccttcatatagtccacaaaaatggattcttttggttctatgcaagtaaatatttgatataaattctgggttttttgccgagaaaatattttctcaagatttccataaataagcttcgttttatacacgtaaagttgtaaaaaataaaatccgtcaactttcctttttttgtttgatatattgtgtttttttcttaaagattgtgaaaaaaaagttaatgttttgtttttgtggatgattttattatggttttgcagagaaaaaagtggaatatggcttcatcgtcttcatcgtcgtcgaattctccgtgtgcggcttgtaagtttttaaggcggaaatgtcagccggagtgtgttttcgcgccgtattttccgccagaccagccacaaaagttcgtgaatgttc

SEQ ID NO: 13409 - DNA, 685 bp, Gossypium hirsutum
ttcaggtattcaggagtaaccagctatttgttaagttgagcaaatgtagttttggcacaactcgaatagaatacttcatatcattcagcaaggcacattttccatggatgaatctaaggttgagggagttctgaaatggcctataccacaaactgtcaaggacttgagagggttcattgatttactaaggtattacagaagatttatcaagcattatggggttatggctagacctttaactgcactgttgaagaaggatgtcaagtggcaatggaatgaagaggttcaaatagcttttgaccaacttaagcaagcaatttgccaagctcgagtgttggcacttctagacttccaaaaggagttttgtgtggatgttgatgcatgtgactatgggattgggatagtgttacatcaaaaaggcagaccaatagcatttttcagtaagggtttaggagttaagcaccaagctctatccatttatgaaaaagaatgctaattgtattactggcagcaaaatggtggcatttttaccttgttgggagacactttttgataagaacagatcatcaaaaccttatatttttatctgataaacaagctattacaccttaccaacagaagtgggtaacaaaaatgttgggttatgactattctatttcttataagaagggaaccatgaataacg

SEQ ID NO: 13410 - DNA, 511 bp, Gossypium hirsutum
  misc_feature (249)..(249): n is a, c, g, or t
  misc_feature (454)..(458): n is a, c, g, or t
  misc_feature (501)..(503): n is a, c, g, or t
gctaaagcggtgtgctattcattcgataagtctaggcactgacatgaggcatagagctaaagctttagttccgttggctaccgccaaaatttacccataaagatgacaatcttataaggtcactgatagtatgctagtgctcaaaacgtgttgtcattctcatggttctgtattgcttgaaaagtctagtgttaaaacgaggctttctcgaaaattaacaaataaggagtagtcacattcagtttgtantgaactacgttgctccaattattcattttttcttgatgtatccatgtttgacatctgtccaagacattttcgaacatgggtatagagaactgcccatccctcactcaatttcaagtaacataggtgcaaatagtaccttttgagcctccaatttgtctagctagggcttttatgttggaaaagaatgcttatatgccataaaaannnnntcacataaatgaaagtttgaagttgcttttacaattgtctatnnnaggtatat

SEQ ID NO: 13411 - DNA, 656 bp, Gossypium hirsutum
  misc_feature (57)..(57): n is a, c, g, or t
  misc_feature (59)..(63): n is a, c, g, or t
  misc_feature (646)..(652): n is a, c, g, or t
aatggatgaaattttgttgcaaataccaagtattgactatataccagtgaaaagacncnnnnngagcttcagatcaagacccggatacactcttgctcctgctcctgctcctgctcctgctcccacttggactcctgctaacactgcgtcttttgggactcttgctccttcctttttgacgctgcacgcaatatccagcaaatttaacataagaattaataacagggaatagcaactatatagattaagctggacaaacaaactgtaaggcaggtaaaaacaaattcaattttgaaaaccttaactagacaagcgatgaaaccacttacagaaggcaaaggagacctggaccttgaaggagatctgcaaaagttccagagaaagaacccaagtttaaaaatcaacacgttccttttaacaactttcatgtccaagagccttgatgccccttccacatcagaatcaccatattccaaacgcataaaagaaaaagaaaaaaaaaacaaaccataaccctttaccggaaagggaaaaaaaaaaaaagaaccacctcacaaacctgcctaaggaaaaaaacctatccaaacaaaatgaaattcttaaaaaaaaaccttttcccttttcaccccccccgaataaaaaatgnnnnnnntcca

SEQ ID NO: 13412 - DNA, 460 bp, Gossypium hirsutum
tttgaacgtccctcactttatgcattagcaaattcaactatgacatttttattttattatttttaaaaagttttaacctattgattttgaatctagattaaagactagcatttaattaaacatatttttattaattacctactgagtttaatatttatttaatattttatttccttttaatgtaactgagatagattcaaccattttgattcatggaatttactgaaattttcaccaatttaaatatgtacctatattataatcttaatatcctaatagaaaatcaaaaccttgaatatttaaaaaaaaacagaaagtcaatgccaattttttttaatgttgaatttattttttaaaatcattgaatatttttcaaaatcagaaagtcaatgccaaaatttttcaatgttgaatttatttagctattatcaaactgtccattctttgcggccctaagtta

SEQ ID NO: 13413 - DNA, 687 bp, Gossypium hirsutum
cattgaccaaattacctacccttcagtaactttttttaatcccttctgcttttcactattagcagtaactttagattttacttttggttaaaatatgctctaagtacctatatttttttgtagatttagaatttagtctttctattttttttcaagaatttaatccctttactttttaaattttaaaatttaagttcaattgtttataagtgtgtcattttggaataaacagatagtgtcattttggaataaatggatacacacttgatagcaatataacaagaaaaattatgtaataaacttaaaaagtaaataaactaaattctttgaaataaaaataagataactaaatttcatatatgcaaagagtataatgacttagaacataatttaaccttttctatttcctttcttaatttatcataaaagatttacttgattctcactttgagatttttctataaaagaaacaccagtatttttattttttattttgaaagaatgcagtaaattaatatatgaaaatacattcttatcccaagttgtttgaaattgaaaatgttgagttcatgtaatattatgttaaatattaattttgaatttcaatatgtaaattaaaaaggtaaaacatggagagagagggggaggttccagtgtgaatcgggctagaacgggaaatatggagtt

SEQ ID NO: 13414 - DNA, 647 bp, Gossypium hirsutum
ttgtgtttcattgcaaccttggtagttctgttttctacttacaaacagatattataggatatagaatgtttgagctccttgtgtgttatgatactgtaactgttcattttctttggactactcttattcaatgccatgttcggcaaaccatctacatgctaacacagacttttgaaatctgacaaaacctgtcctttaatagaagaaatttatcttactgcatcagttctatctacaagtttatattgtcttagaagttcaggtctgcatttaaactgttctctgtgaacgcagtttatcaattttagttgtttgcaccaacatttctgtatagggattaaattacttagttatatcatcattcaaatacatgaaaaaaattgagcatacccatgttgaataaatatcgatatctgacacttaccctcatgtttgctgaccatgtaacatgttatgaaatactttccgttttctgggtaacaatttggatcatgcattctttaatccaacattagatcaagcatgttgccattttgattgtagattatggataatcagggtgcttattggataaaagaccaaactgctaaaaaccaaagttgaggaaccaagtaaagcttcatatcgagcttgtggtctcaataaga

SEQ ID NO: 13415 - DNA, 662 bp, Gossypium hirsutum
ttttaatacccccatgctcagtttttgccaaaatttgatatactaccaaaagttcaaaactaaaaaaaaaaaaattgtgtagcttatatgaaacatgatctagatttgtctacttttaacaaattatatttatacattttatgagttttatttaattttcaagaataagaaacctaatcattttaattactttattgtatcttattaggggaacatagttttcaagtctctcaaaatgtctactagtttcatgcttgctactatcatactgctaatgattctttccggttcttactttaaaattctccagattcaatgttgttttcattttgatttttttattcttttgacccacagacatatctttggccattgattatcttggtagttgcctactatagttatcccgttatagcctaaacattgaaaaactccaacattagtttatagaagctttaaatttgattattagatgtaataaagtttgcaattaagcaaacaaagctctaaacgacctgttgcggtgctgatgcggcgttgtgctactttttaataactattggggcattacataacggattttaaccgcaacaattgtgacgcaatttctttgatgggttgcgctgatattgcgccccgatagcttccatttccgttacgtg

SEQ ID NO: 13416 - DNA, 603 bp, Gossypium hirsutum
cttgataaagtgctagtccaggataaacgacagcttcttgaggaccaaggtccccatcaacaagaaaccaccgaccatgaaaatctcttacatgcaaacctgccttatctgacttaacgacagatattaagcttttatcaacctggtgatcatggtcatggaacatcatcaattgaccatcatcctgtgttgttaaattgtggtgttgtgccccatgaaaagaaggccttgcatgacaacatacagataataccgaagatgatacttccctgcttcttaatggtacgttatcaagtatttcggtaaacggagagctgcgcaaattcaagtaatagctcatagcatccagtacgcctcgtgctgccttaccaagcaagccaaatatgtcgggcaaaccacccggaggaagctccatcgcattactgggctctataggagttaagcctggtctataatcatatgtttcttgccaaagttgcggatcagcatagtaaccagacgttttgcaccattcacgagaatcatttgtgtgaatcatgtccgcggatgggtatgcttccctttgttggaagtaaaggcaagcagaatctaaaccggatctca

SEQ ID NO: 13417 - DNA, 648 bp, Gossypium hirsutum
cttcctttggttgctggtggaaaaagaaaccgttcatcacctttaatcttaagtttgccatttccatttcaatttcattttaatcttttacactattgagagaagtaaaggttggggtatatgcgtgtgcatgcatgtgtgtgtttttgcataaaacaacttgataggtacataattacaattgagctccttgcttttgttgacttgttgaactcgtaaaatttacttgattctttgcagcatccttcggatcatgttttccacattgttactgataggcttaattatgcggcaatgagaatgtggttcctaagtaatccaccagggaaagccaccatacaggtccagaacattgaagaatttacatggttaaactcaagctacagtccagttcttaagcagttaggttctccttccatgattgattattacttcagggcacatcgggctagttctgattcaaatctgaagttccggaacccaaagtatttgtccatactgaaccatcttcggttttatctaccagagatcttcccaaaactaaataaagtgttgttcctagatgatgatatagtagtccagaaggaccttactggcctttggtcacttgatttgaagggcaatgtcaatggtgctgttgaaaacatg

SEQ ID NO: 13418 - DNA, 717 bp, Gossypium hirsutum
  misc_feature (688)..(694): n is a, c, g, or t
  misc_feature (699)..(700): n is a, c, g, or t
caagttctacttcctagtgattacttgaaaaagtcgggccaggctcttgactaaatgcttcattccctaaaacacatttgttttcttagagttctcaagctctaatgagtagttgaagttatcacgatactatctataggagagagatcaaagagcatcccaactaagtaatctgaagacacttatgcttctagggtgcctttggccttctaaattgcccaagattttaattctggtggaagcttctcactgattcgtactgcaaagattctcgccgcactcttcttccctgctcacaagagtgaaaactgcgtctaaatattgatccctcaacccatagatgatcatggctgttggcgtttagaacaaagaaagaaagcaaaaacagagaaaatagcagtataacaagtctgctctatatttcattttcttcgtacttaacaatatataccagtttctttacaagataactcaacaaaacccactaaaacaatcttgaaacttgaaataaatttcttgtacacaactaaattaaccaaacatgtcaatcattacctaaacacaaaagatctaattaagattggttttacctaaaacacacacgcacttatcactggttgcgtgcaccaaaacatttcattctaactgcagatacagtccacagacacattaatcggatacactccgnnnnnnntactnntctgtggactgtatctg

SEQ ID NO: 13419 - DNA, 699 bp, Gossypium hirsutum
tcaacaccatgcattgccccatttgcaaggatgagttcgagatcggtggagaagcgagagagttaccgtgcaagcatttgtatcactcggattgtatcgtgccatggttgaacatccacaacacgtgccccgtttgtcggtacgagatcgacaatgagtctggtaacgctcctggtgactacgaaatgaatgagattgatcgtggggatgtcggtcatggtgttgaagatttggcaaatggcttaacttggttgcggactcggttgctctcttcgaggcctcttcgtgtgttctctcattggactcgcggatatcttgactctctcgatagtattatcaatggaaataatttctctcaaaggggtaggatcttctaccacagctacatacatacatacatacatacatacatacatacatacatataaagattgtgtaacacagtagctatgttatctcccttgcagctagctcctggtggcgctcttggctcatcctataggttatctatatataccagcggccaggtatgtatgtatatgtgtatgtaaatatgtatatatatgtatatgtttttagtatactaaatttcacattacaaaattgaaaataagtgttaaaaatttagtttcttttcttagagaaattgttaaactatttttgcaatcacatgcatggttaggagagtagacactatca

SEQ ID NO: 13420 - DNA, 594 bp, Gossypium hirsutum
aatttgcagcaactaagtggatagggtgccataattgctgcaaggccgaccctcctccaagtcagcaacattaacaggttctctatgtcacttgcaggaacaacgaaacctatatatcctcctcaaattcacttagaaccaacaaaggcaactagaacaaataaagactaagattgccataacaaaagttaacaggttacacgtaaccacatgaaagcaaaacttacagaaacaatttaactatattcactctacattcataaacaaccacatcataccacaaatgaatcacacacagcatagtaaatatcatgaaaacaaaactaagacttctacttggaataaaatgaaaaaaaaagaagaagaagaagaagaagaagaagcgaagggaagagaagctaactgttctttttgttagtgcaaggatgaggacttgaggggacttgagcagcagcagaggtaacattatccactgcgagacaaattttttaagagaattgagttagattaatctcatgaaaacaaaattaagacttatgctaggaataaaatggaaaaatagaaagaagaaaagagaagcctaccgttcccttt

SEQ ID NO: 13421 - DNA, 520 bp, Gossypium hirsutum
tttcagaaagggtacctaagagactaaaatacaaggaattcagaactctctagaaccataacccggagcataatgtaccaaatgtcacatgctcgtgtatgtaagattatgaatagtaagcttactatcaagtattaacagtatgatttccaacatatacaatgcacacatacatataagataatcataacattaatattttcataccctgagtgttttcatctttcaagacattttcgaccaacaattagtagaaagtattgctagaaacaacaacagagttcataacagcaattgatacactcacacatatggttactagttaatacccttagaataggatttgatgccaaatgtcataatccacactacgttactagatattgtataattcgatcaattcacaattttattcgaaaaggtacttaacagactgaaaagaaaagggattcataactcttctctagaaccataacacggtgcataatgtaccaaatgtcccatggtcgtatatgcaaga

SEQ ID NO: 13422 - DNA, 512 bp, Gossypium hirsutum
  misc_feature (54)..(55): n is a, c, g, or t
  misc_feature (57)..(58): n is a, c, g, or t
  misc_feature (61)..(61): n is a, c, g, or t
  misc_feature (386)..(386): n is a, c, g, or t
  misc_feature (406)..(406): n is a, c, g, or t
  misc_feature (440)..(440): n is a, c, g, or t
  misc_feature (448)..(448): n is a, c, g, or t
tgtgtgcatgactgatggatgcattactttaaaatcaaatatagtttgaatttnntnnaanattctggtgcatttttgtttcttgtactttatgcagtcaactctttatagcttgtcatatcacttttgttaagtgatgagtaaacagagagataatcaatcattgatttgtaaatatgttttgtcattttttccacataggttctttggacatcttacttcaaaaactacaaatcaaatcaagaaattaaaagaagtgagttccttgagttatgcatggcactaggtgtgtgtatttttaccaaattttagtttgcatcccactttccaatggctatctgcccgtcttagaaaaaaaaaaaaaaagggaaaaaaaaaaaaacaangggcaatcaagttctatggnttccggggggggtatttttcaaaaaaaaaaaagngagggganattgggattctctcacagcatcggggtccctacagttcttctatccgaactatgggcaaccttc

SEQ ID NO: 13423 - DNA, 510 bp, Gossypium hirsutum
gtttacttcccaacaacaacaaccatcaataaaattaattaaatacacttcaaaattcagttccacgacgaaataaaggggcacaaatctctgtattagacttttgctttaccagttaacatctccagcgctgaaaaattattgtaatcattgagtgtaagttaatattagacattcttagagagcaccccagccgcaaacagcagattcctcctcgaaaactgcaccatattccaattttatatacacattcgaccaagttaaacattgcatactacgttgagaatatgaattaacttacccgcaaactatacactggactagacttggttgccaaggttttcaacgatctcagtctgttgggatttccactccttttgttcattcacattccaggcaatatttttagtttataacttcaaatataaacatattagcagatcaacattcttatatctaacttacttttcttcgtttttcggggcctttgtgcttgttgtgacatcccaa

SEQ ID NO: 13424 - DNA, 429 bp, Gossypium hirsutum
ttaaccatcaaagcatgaaattttgtaatgtaagcaagtcatacagaacatactaaaagagaacttaaaagtacattatgattttcacacaagtttgttccataaccaatagttatcaaacaaaattattatgctgactgcagaggaacaagacacgggattattgcatcgatccattttctctgttaccactttcactagaaatctcagttttctgcggttattcttaacatgtacttataaaaaaagaacgggaaaaaaagaatactcgtacaagacagaatcaaagaaatttagtgctttcacaaaggcaaatcatctctctcacgcaggcagttattttcagcttctgcatgtgacatgcatgcgtgctaggatgcacattaatcgagatggaagacgtgaagataaccagaacgaatctgacat

SEQ ID NO: 13425 - DNA, 652 bp, Gossypium hirsutum
attgaagtggtctgtgtatgaggttgaagtagagaaagaaaaactcagaaagcaagtagttgaattaaaggatgaccttaagaagaaggaagatgctgttactaccatggaaaagaagctgaaagagagcaatgaaagagcggcagtttctgatggaacaaaaacaccattagaagacgataaatctgccatggttcctctcagtcctatagaggttgcaagcctaagggagaaagtaatgctgcttgaggtaaattttcacattcgagttttatttaaaatcctctttggaacagtttgttgcacacggttcatctttttttctggagcagagtatgaaaaaggagaatttgtgttcatatgattcatattttcctcatggcagggacaaataaagtcaaaggaaactgctttagaaacgtcaacaaatgtcttcttggaaatggagaaggatcttcagaagaaaattgatgagttagaaagcagagtagaagaactcagtgagcgcagcaccagtttctggaaatgccaactccaaaaggtcagaaacattataccatgattgttaagaagatacaaaagaactcatttttaaggggaattctctaatattaatgaacaataatttgaaggtcattatatccagctttga

SEQ ID NO: 13426 - DNA, 450 bp, Gossypium hirsutum
gggtaggacggcgatgttttggatggatatatggtgtggtaatcatccattaaaataggaatttccaaggctatttcgccttgcaggacaaaaggaaagaacggtagctgattttatgagactctttacaagattgttattagaaagagaggaggtgatgcttagcaaattgttagagagggtgaggagcacagtgttagttccggatgtggaggataacttttgttgggcacatgatataaacggggaattttgggtaaaaaaatgttctgaattattgataatggatgcaggggaggatataaatttcgcttttgataaaatatggaaacttaaggtaccaccaagagtgcgaagttttctatggatgctcgctattgacagaattgctacaaaggaatttcttgttaaaagaggggtgaatcttcaaaacatctcgattagttatcc

SEQ ID NO: 13427 - DNA, 503 bp, Gossypium hirsutum
  misc_feature (185)..(185): n is a, c, g, or t
  misc_feature (260)..(260): n is a, c, g, or t
  misc_feature (263)..(263): n is a, c, g, or t
  misc_feature (278)..(278): n is a, c, g, or t
  misc_feature (335)..(335): n is a, c, g, or t
  misc_feature (342)..(343): n is a, c, g, or t
  misc_feature (346)..(346): n is a, c, g, or t
  misc_feature (490)..(492): n is a, c, g, or t
gttggagcgggtcgggtcgcgggtcggccatgggttaagagccaaaacgacgccgttttggcattagtggcttaaacccaaaacgacgtcgttttgatggggctatataagtcaaaattcctaaaaaaaaactcatttttcccatttcataaaaaaaaaaaaacccctttctctcaaactctctnaaggccttctccctccgaccaaactccggctccgtccgccgccatccgccgccgccggccaccgcgcacgggggncgnaaatttcaaaaaggnttttttttatattttttatatatataccttgatatattttaataaatgaatgaaaanaaagggnntcnaaaaaaaaaaaaaaaaaaaaaaaaaaaataaagcgggttggcccttccccttttttttgagggtttggttataatctttttttttttaggggtggggggtttttttaaaaaaaaaaaaaaaaaaaaaaaacccttttttttctnnnttttttttttt

SEQ ID NO: 13428 - DNA, 684 bp, Gossypium hirsutum
cttcaattcaaagccggtacttttcatttccataaaaagctaatgttactattattatatattagaagttttctgctaggaaatccttatcaaagacattccttataatgggttgagattcttaattttgaaaaagaggaattctttgttaagtattgtttgactttaaggtagaggaactttgcaaagcttagctgctttgtgtcttacgtatgtgtgtgtttatataatatctttgcagtgtttaacttattattaggacaattacgaaaagcttgtacagaaattgaaataacggcactaattaaatggagcttttatgcttgactttccttagctttagtttctttttccccttttttgatatcgaaagatgcatggttgagggtttgcatatttatatatatacagaccggaagttttagtacaagattttccttgtcgtcatttgttaaacgagtggagaaactcactgatgatcaacgaactgcgataaagaaagttggtttcggtaatttgcttttgatacctaaccagatgctgagcaagagtctgctagtagagttgatggacagatggaattctgaggaatgtggttttatgctgcttcctggtattgtcaaaattacactgatggatgtagctttaattttggggattcgcgtgattggtgtccctatactg

SEQ ID NO: 13429 - DNA, 580 bp, Gossypium hirsutum
ctgcacctttgaagcttaatcacccttttcatcgcgaccatccacttgatcttatgcatcatagtcttcttattaagaatccagcttattgatcgaggtacatttgtgatttttgcgataaaggcggtaatgaatttgtctatcagtgctcttgcaatttggacttgaatattaaatgtggtttatttatacttgatatttccgaaaataatttgaaaaagattgagcatgttgcccttcaagatccattaatttgcactaaaaatgatgatgaagaacttaaacatgttgttaactgctttgggtattggcaaccattaacaaaatatacataatttaatttgtcatgatgaggtcaatccagagctcggaagttatcgttgtttacattgcaatattacattccatgtgcattgtgtgacaaaggatacaagctcatattcaatagtttcacttgaagatgaagatgagatattcaatgaaagttccatcaccgttttggagtggaatgatgccaaagaagctacaaaagtaaaacacttcaagcatatgcacaatctaatgctaagtgcttccgttg

SEQ ID NO: 13430 - DNA, 694 bp, Gossypium hirsutum
agttggtaggaatgaaagatcgagttagttattcacagagctaccactacttgagcttacacccggactcttactgtagtatcatttccagtatcctaaaaaatataaatacaagtccgtttttatattccttatagcacgggtatagattacctcacgggatgaacttattaagttatattaataccagaatcgggtgttcaagtcattaccattcaagtctcaagcttccggctaccacttatcccaaggtaggtgggaaattcattccggatggagcaagaatataaaatttttattttttatttataggcttcggcgtatgtagattcggcaaatgtttccacatctcggatcctgggttcacactctaggagtccttttcttcgggaagtgacggatcaatctttcattgaagagaggaattggcacattagaatcaaagatgagccggcttccttattattttttcactggcattgtaaatgactggaaatggcagggcaaagacgagtaggggcggatgaagataaagaaagagaatccgcggacataaataaggaatagcccgccaaagggaaagcgcaaaggtcttcaagtcaaaagagacaagagctcccctatcagcgactcaagcattcaatgtcatatttttgctcattgaaaggtttattcaaagctcccattctcatct

SEQ ID NO: 13431 - DNA, 591 bp, Gossypium hirsutum
acgagttggttattccaattttctactagaacggtctgcaccaatcagtgcgatccggaccagtgtgaaactgaccgactacattgatttaaacctaaaaactacaattttctttttacttgaacaaaaggactttaaactaaactgaattttcgtggatcagtcggggggatccaccagaaattgatgtcattgggagcctcggtttctattgtacttaaaaaaggacatacaacagttcctagtgccatacttcagatacgaagttggaggatttaatttcccaggaagattgttggcttccttgctgagtactcctacaaaagtcatcccctaaacattggagaatatatatgctggaactaacaaggtcctttcttctttctttttcttttttatgaaaaataagaatttatttggaatggccatacatctaaaaatgcatgctagaaataaatattcttacctcacagtctaaaccgttaaatttcaatagacagacagcctaaaacaagactttcgggaatctttaaacttaatttatctgcaatgttccataaaagtatccatgacaaagaactaaaggttgga

SEQ ID NO: 13432 - DNA, 496 bp, Gossypium hirsutum
ttcttcaagagctattcaattcaggaagctttctgggtgttatgaatgtcatacgatcgttgaccctagcaggtatactatttatataaatatagaaaaaaataatttgaattttttttctcattttccagaactttatttagaaaatgtgaaaaattgcaggtatccatcgtcaagaacaagcatctgtgcctgctcacagtgcggagaggtgttcccaaaaattgaaagcttggaacttcatcaagcagttcgccatgcaggtactgtaatttctatacctattttatattcctgaaattgactagatagagtattacttagtcattaaaattgtttatccaaagttacagaaattaaaatgaaaactttgcaactttgacaaatcagtgggttaaattgcccaccacccatttcggaaaagactgaggcaatgacgtggcaagtagtgtttatggtagcgctaaatatgcagggttttgtgaaggacgtgccc

SEQ ID NO: 13433 - DNA, 514 bp, Gossypium hirsutum
tactagcattggtttcattcacgcaaagttcacaaaatatcaacgtcaactcatcatctcaaacagcttttgttgctaagctgctatctccctccccaaaatttcgtgtatttaccatctattgtcattgatataattcagtcaatgtgctagcattcaccaagaaacatagagaaaatatatagtctataagttatattagacgtctcccaatgctaatctttatctagccacacccaaaaaaaactagcaccttaattgaagcttcaacttaatggaaaaaggggaaatgaatgtaacaaaaatataatattcaagtctcatatttactctatttctaattctcttggacacaagacatatttatatggatatcagacttaagtctctgaggcaaactgataaaattaaagaaaaaatctacaagaagcattggttcacgtttattacttaaaaatctatctacaatacaatttcttcatgtttctgtcaaataaatacaggaccctttggg

SEQ ID NO: 13434 - DNA, 602 bp, Gossypium hirsutum
tttggactatacagcaatgcttgcatcacgaatattaattgttccaattattttattgtttgttttgtttcttttatcgaagactatatactataatacttgttattgtacgaccaaccaattccttaaaatgaaaggattcgaacaaaaaaaccttttctacaaccacgaaaaggggctttatagatttcgcatctaattcaattttgggaatatgaaaatatctttcatgaattattagaacccaactcgtcggactcacactttaccaaatcttcagtttctagtctgaagccagtaatggaaagaaaccctatactacaggagaggcattttcctattgaatggcacatggttctgcattaacataacaagcaaaaaaaaaaaaaaaaaaaaattggaacccttttttttcaaaagggatgaaattgggtttagggggcaaaaaaaaggaaatttaatgggtttcggaaccctcaaaaaaccccccgggaccccttttgaaaaatcccaaaaaaaaaaaatcccaggaatttccctttttgggaccctttttttcaaaaaaccaccccccctttttagggaaatgaaaatgggggacc

SEQ ID NO: 13435 - DNA, 712 bp, Gossypium hirsutum
  misc_feature (704)..(706): n is a, c, g, or t
tgtatggagaattgaggccacctctcgggaagcatcgtctaaaggttcgtttatattcttgttataaattttatgagccaaccaacatggaatgctcgaagcctgtttgacttatttggtgtttttgcacaatatcagattttgtgtggccttgcctgaatgtttattgggttatttttacattatttttctatttatttcagattgtggagttcattgcggtgctgttgagaactggaaatgaagctgcacagaatgaattggtcaactcaggagctattcgacgagttcttgatcttttctttgagtaagctcatgcttagaactgtcatcttgattaaagtgaaagcatttaattgcaagtttgaatttagaagaatgtactttgttggatcattttgttagctggctaacattcattctccttatttgaaattatgcaggtacccatacaacaatgcattacaccatcatgtggagagtataatattatcttgtttggaaagcaagaatgatgctatagttgatcatcttcttcaagaatgtgatttgattgggaagtttctccaaactgacaaacatcaaattctttccagtgacagtaatcaggtggatgttaatcatgttgctattattctgttcagctaacaggcattataactagtataatcagaagccgtttcgaatgctacctgattaagacnnnttttct

SEQ ID NO: 13436 - DNA, 445 bp, Gossypium hirsutum
tactggtgatgattgtaagggttggctcatagtcacacccatttgagctgctttctgcaggagtgctgttgcagacatgtgtggagatgctgtttgggtctggaatggaggaagaagtgtattagaaccagtgttttggctagggttttcgttttgtgacagtgggtgatctaaaaggtttattggtgggggaccaggccatggtggattaaggctatcttctgttgttggtcttgcattgaaaggatgttcttctcttttcactgataagccatagaagtcgtggctatggagttgggattgcagattgttcatatgtgaaactgaagaaccaccaggtacttgctgtgctgggcctgtaattgctcttgcactctcctcagccaaggcatcgcaaaacgctctgtgagtgatgaaactgtcccttctgtatcaatcccccccc

SEQ ID NO: 13437 - DNA, 589 bp, Gossypium hirsutum
cagctttcatgatgcttagcactccattgattgttggttttatgacttcattctgcaactcagcaaacagtcatttcaatgttcttatgtaaaagtaaatctatgctactactagattggcttttaattacatttcttaaaccatattccatattaatataatacctcagggtcctcggactcgaagtccataggcgtggccacgtggaacacacccgtacaaccttgaattgcatcatcaaagcttccctcttcagctaaatctgctttccaaagagtcaagtgcgtctctgctttaggtagctccagtaaatgcttcaccttcttcgagttgtctgctccattaataaaacaagcaaatatgaacgacaacaattaaaactttactatttttcaagtaaaaaagatgcttaaatcatccaatcatgagggacaagaaagtgtttagaaaacaataataaagggacaaaccagggtcgcgcacagtggctcggacgacataaccgcgttccaagagcagcttgatgagccatgaaccaatgaacccagagccgcctgttacgcacacgatctcgccttccgtgactga

SEQ ID NO: 13438 - DNA, 577 bp, Gossypium hirsutum
cgtacctgactgtttttgttgcaaacaagcagactagatggatatttccaagaaaatagcctctaaatacctatgcacatattcagaggcctcccctggagaatcatactgtatgatacatctaacttttggaaaatctaagcccctagcagcaacatctgtagagacaagaagtgccgatttttctgttttgaaggcactgaaggtggttcttctatcttcctgcttcatattcccatgtaacctaaaagttttgcatttcagaaacatctgcttaagttcttcttcaaattgcgagtagggtgaccactggaactcactcaacagcatgtagtgaaaatccactgcatcacatgttgaaaagaataccacaacctgtagaatgatcattcaaggaatcaaacaagtatagcataggaaatagatgttataaaagctaactttcaggaaccaagcagagacaacagaggcaatgaactgatactttatgcttgaacaaggtaaactcacaaaaggttccactctctaattgcagttattctggaaaattcaaattaaaggaatccgatgatgcaag

SEQ ID NO: 13439 - DNA, 561 bp, Gossypium hirsutum
  misc_feature (50)..(54): n is a, c, g, or t
  misc_feature (305)..(305): n is a, c, g, or t
  misc_feature (402)..(402): n is a, c, g, or t
  misc_feature (480)..(480): n is a, c, g, or t
  misc_feature (518)..(518): n is a, c, g, or t
  misc_feature (520)..(520): n is a, c, g, or t
acatattcacaaccgaagcggcgccggaatggacaatttcgaggatttgnnnnnaatatctgaagaaaccatctttgctttccaatctaaatcaaccattttcatcaaacgaacaaaaaatggaaattttcagaaaattaattatttgtgattttaaggtttagtatttttttgacttaaagagatgaagagagattgggtatttataaggcaagcaaaaaagacaaggcgtgtggaaagccagaagaacaaggatttctccaatttaattaatttttaattaattttaatttaatttttgaaangaaacttaacccaaaatgaattttccgaaccaaccctggaactgaaccgggggccgggtaaaaagggaaggcctgaagggggggttcggaaaagggnaagcaaacggttccaaattggactttggccgttttattttgtttatttttaattaattaattaaaagccccaattaanggccaaaaaattcaaaaagccgggttttttgggctagncnatcaactactttttacttggcttatctcatttgtctctcca

SEQ ID NO: 13440 - DNA, 600 bp, Gossypium hirsutum
gagtcaacgggtcgctgactgtgcaattgatatattacccaatatttctttttatctaatggatcccctctcaggacataaaaaactatataaaagaggtttcgaaaataacttcaattatttttacgattaaaaactgattattatacgttaaaatgaggtatatgtggcacaccatttgtaattatcgagttattctgttaactatgccaacttttaatagtaaaattaggtaaaattttgaataaaaacaattaatttattttttgattaaatgtatagagatcaatttatctattttttaagtaatgaagtaaaatgtaattttgctcaatcactttcataatattttatctactaaatcccatataatttatagattatgatttagaatttaatttgagaaaaaaagaaattgaagtatgccagattgtagcgaaattttcgctcaaaattggtgtaaatatgtaatggaatcgaattatcagaaaagtcaaaattcaaccagtacagtgcaatatcaatatcaaacaaagatgaaggaatttttataacaccagaatagtgcaatgctctcaccggaggtcaagataataacaa

SEQ ID NO: 13441 - DNA, 328 bp, Gossypium hirsutum
aggggtgagatggactccgattcagcaagggaatattccactgggccgccgtcatggagtgtaccagggatcgagttatcaggctccgaatctgacggaaataaaggcgacttcgtggtaagtttctcgagaagggatttgcattggtgagcaagtttggagtgcttccgccatgaagcgttcttgatgatcttctcaagggccgggactaccacttggctcatccgggaatcggcttccgcagaagccattcccgagtcggatattgcacttcgcttataaactcggatctaggaaatggatagcaaaatgatagggtccgttcttt

SEQ ID NO: 13442 - DNA, 649 bp, Gossypium hirsutum
cttcagaaattcaaacaagtgagccatgtttttgtgatttgagtattacggtcccgcgttagatatacataatattcaaatcgataaaagatgtctattgacaataatatatatatatcaatacatatttaatgattgaatgcttttaatatatgaaataaatagtttaaatttacacaacaatggacaatgagcaacaatatggccgaatatttgctaggccgaacgaacaaaaatacccaaaaggcagacccaatctgccatatttttgtcattaaaaataaaaagaaattaagaaagggcatatttgagtgttgggcaattaattgagtcatgttttcatgggttgaataaaaaacttttgagtcggatactatggctttaggatatagataaattatgtaaattataaaatttttgggtccaatcgaattattattatttctccaaagcccgaattgaattcaaagatgggattctttatataatacatacagattttagaaaaattaaaaaagtaaaaaggatacgaatcctaaaagttttaggctaccactaccaccacttcaacatcagtggtaagcgtggccggagcaaggacaacaaataatatgtgatgatgaagagtcaccaccaccgcacctggatg

SEQ ID NO: 13443 - DNA, 570 bp, Gossypium hirsutum
cgaaagaaacatttactagtactatatagagttgtggattacctttcaggactccataaaatataaatgaattatcacccaaaaaaagctaaagaacaaaatatatgcaatgtttaaataaagcaaaaccttctctcccctttttaaattttactttcttttttctaatgtttataatgtttacaaccataaaaagggaaaagagaagaataaatgattaaacataatatttttgctcgaatacatgacacgatcccagatttaatttgaggaatgcctaccatgatttgaaagcacaatgccacttaaatgttaaatgagaatcaccaaacaaacagatattctagacttctggtgcttgaaggaatgaattttcgaagtaacttaacactaggttttaccaggacaccgctcaaattaaaaatttaatatgcaaatcaacaaaaagaagaattcagataataaatcaatagataagcaaaaataaggagataacttagcttccgagaagagcatattatcagacatactcactttttattccaaccctgcaaacagcaacggagatat

SEQ ID NO: 13444 - DNA, 660 bp, Gossypium hirsutum
  misc_feature (62)..(67): n is a, c, g, or t
ccttctttctcgttcctttatcgataatataagctttgaatttgaagaagcctgttcgcttnnnnnnatatcaaattaaaaattgaattaaaaataataaatggttaaattttttttgaaaataatatatttattaattaaaaataaaaaaaagcttgaaacaacatgaaataaaaattacaattgtgtttagaagaggaggaattgaacttgggactcaaggataaaatcattattatttaaccatttaatcaagagacgtaatatgttaaaaagcattaattaaaaataataaaaaccttaaaacaatatgaaataaaaaatacaaatgtgagtgagagaggaataaaatttggaacttaaaaacaaaaccactaatatttaaccatctaactaaaagaaattgattatattaaaaaataaaaaattgatttaaaaggaaagcgcgttcaactgggtgcacttccctgccacctgtgcgctttcacacactttctccaaaatcgatctatttctctaaatttcaaaaaaaaagtcctatttagccacaaaacttttttttttaacatatataacaatttaacccataaaccccaaccaaattaaaaaattaaaaaccattttcccgggcccttttaacaaaaagcgtggggtttccgg

SEQ ID NO: 13445 - DNA, 1355 bp, Gossypium hirsutum
  misc_feature (675)..(678): n is a, c, g, or t
  misc_feature (1346)..(1349): n is a, c, g, or t
aggtcaatatatgtcagggtcggccttgaatacatgcatatatgatcattagaaataattgtattttggaacatgggaaaccttgaagtctcctactaataggaagacttgtgctgattcctaagcataacctaacaatacccatttttgtttataagataactgtgtttttcagacagcaaacgaggcattgatgaggcaaattcccattcgatgggaagttgatgtacggagatttgtattttctaaacaattttcccattaaaaaaattgcttatatatttttatcgacaggtcaacttattctaaagaagtctttaaagtattgtctgtgaggtagttgatcgatttctaacaaccaaagttttgtctcccatagtataccgagagccagtgtgcagttagcaaccacttggtagggggttttatttctagttctatgctgagagtcaacatatagggagggattttccaatgggtagggacaaaagcaagggggcaaacagcggcattgccggccccctcccttaaaaggtagattttctatttagctcctttattttttataaaattatatgttagtataatagttaaattggactttgggcctctaataatttatgattcatttctgctcttttaagtaattttttggcttcatctttgtcgatgaannnnaagccaaaaaattacttaaaagagcagaaatgaatcataaattattagaggcccaaagtccaatttaactattatactaacatataattttataaaaaataaaggagctaaatagaaaatctaccttttaagcgagggggccggcaatgccgctgtttgcccccttgcttttgtccctacccattggaaaatccctccctatatgttgactctcagcatagaactagaaataaaaccccctaccaagtggttgctaactgcacactggctctcggtatactatgggagacaaaactcccatggaggacaatacttttggttgttagaaatcgatcaactacctcacagacaatactttaaagacttctttagaataagttgacctgtcgataaaaatatataagcaatttttttaatgggaaaattgtttagaaaatacaaatctccgtacatcaacttcccatcgaatgggaatttgcctcatcaatgcctcgtttgctgtctgaaaaacacagttatcttataaacaaaaatgggtattgttaggttatgcttaggaatcagcacaagtcttcctattagtaggagacttcaaggtttcccatgttccaaaatacaattatttctgatgatcatatatgtatgtattcaaggccgaccctgacatnnnntgacct

SEQ ID NO: 13446 - DNA, 585 bp, Gossypium hirsutum
aaatcgacagccctctgcatctccgttggtcccgcccattttcgcaatctcgacttcggtgaatgaaacgactacctcaaaggcgtcatcaccgatgttatccatgacccaggccgcggtgcgcccttagctcgcgtcgtgttccgtcacccattccgttacaagaagcagaatgaactgttcgtcgccgctgagggtatgtacaccggacagttcgtgtactgtggtaagaaggccacccttatggtcggaaacgtgttgcctcttagatctatccccgaaggagctgtcgtttgcaacgtcgaacaccacgttggtgatcgtcgaacaaccctgataacgacactaccaggtctttaatttcatactcttgttttaactttaattttaattttgatttcgatttatttgctttaattatatgccttgtttatacaaagtttgggttcaattataaattattaaggcttaagaggaaaaatctgacataatttttgtcatgaatgaatgaattaatgcattgtttatttatttctgcatcactgcatcaaaaggcattgtcaatttatttctgcttccctgcat

SEQ ID NO: 13447 - DNA, 402 bp, Gossypium hirsutum
  misc_feature (377)..(377): n is a, c, g, or t
  misc_feature (381)..(381): n is a, c, g, or t
  misc_feature (383)..(383): n is a, c, g, or t
  misc_feature (394)..(394): n is a, c, g, or t
  misc_feature (398)..(398): n is a, c, g, or t
tcccttgaaatatccttattgagctcttcttacgaaagattgtttttgctttgagcttgttgtgagcttttgcttttgctttgcttttttttttcccgtccattttgggggtctatgggtgctttctttgctttgtaccttctttaaatatatatatatattaaaacaataaagctttatgctcttggttttaaatattgttctttgggttctccatgtcagaatttgaaatgggtttgtcttatattctcttatgagattttactttactaaattgaaatctttaaattgctttttgttctctttggtctttgcctttaggtcttgttagtgttgctacttgccttggaactaaatgattctctttacttatctgnggananaaaaattttgnttantttt

SEQ ID NO: 13448 - DNA, 530 bp, Gossypium hirsutum
tcttctttgtcaacaagtgagggagaatgtcacgagctgcacaaaggagcccaaaactaatgtacacgttttagactcttcatgttcccttggggttattcggcccgtcaagactggctcattgcttcgtagagactcaatacctatctacttagatacaggttaaaatgtaaacactacaataacttatatttttaccagaataattacgtaaatcccttagaactgtcatcttatagataagcactaatctcaatcattgatataattcgatctgtatggttggttctggggaaacttaactataaagctctccccattcatttgtaatcacttcattcttgaactagagaatatttttgaaaacatttattcatacacttcgtgtgctattgctttcttctgacttttctgctttatttcggtgccttagagaaattcctttgtgaattctcatttttgagagtaaggttgatttaggtggatttgaaataaagaaataacctaaggttgcgtggtttgccagactt

SEQ ID NO: 13449 - DNA, 595 bp, Gossypium hirsutum
  misc_feature (462)..(462): n is a, c, g, or t
  misc_feature (489)..(489): n is a, c, g, or t
  misc_feature (530)..(530): n is a, c, g, or t
  misc_feature (532)..(534): n is a, c, g, or t
  misc_feature (543)..(544): n is a, c, g, or t
  misc_feature (556)..(557): n is a, c, g, or t
  misc_feature (571)..(571): n is a, c, g, or t
  misc_feature (583)..(583): n is a, c, g, or t
  misc_feature (591)..(591): n is a, c, g, or t
tcactaatgctttctatgatcatatgaatagcaagctgtgactgcttgcacttctccagcatgctctctgtcagctcatcctgcaagcacacagggacatttttcagagtctttcagcattgtataaatcgaattttaaaagaacatgtagtaattcctacaaacttggttggaagaacaaaaagattcacgatgcagctaacaaaaagcattttgaaaaatataataaaaacttaaatgcagaagcatttcattatcctagcatgcctcacaggtcaatagcaagtaaaaattatgaattatggaagttaaatctccaagacttttacaagttaaaattttgtcctatcatccaatgatatagtattgaatgacgaaagctacacagcaaaaatggttggatatgtaacaagatctacaaactacaaactacatgattacaattaaatcatgctttcgtgnctagaagcagaagaattacctttgccngttttggctctgttcctgtactcaatatgctagagagcacntnnnggctgttcnnagttacttcaannaagttccttctttngctcaacagatnaactcccntaat

SEQ ID NO: 13450 - DNA, 599 bp, Gossypium hirsutum
gtttcccttttctcggtttttgccttttggttcataaaaacggtaatattaaaataaaaaaggtcaaattatgattttgatccctttattatacttaaatttgagatttaagtttatactttaatttcacttttctacttttacaattgcaactttgattttatgttgcataggtgctaaaatttttgaacttttttgttctaaaataaatgaaaattttattatttttcgtttgtgtttagtaattcaatatatatatatttctttttatcttttgttatcaaattaaaatttagagactaaatatcaaatttaatgttgtagaaggatcaaaaccataatttaacaaaataaaaacaccccattttaaaagctataaaataaagcgagaaacccagataaaagaaaaaaaagagaaaagacaagaccaaaagagtaaccttgttgataaaattaaatattgaaactttgctttgcttttttttttcttccttaatttcttattctatctatccaacaagaagcaccgggaaaaagaaaaaaagaaaaaaaaaaagtaaaaaaaaggaaaggattttatacccaaggattatggatac

SEQ ID NO: 13451 - DNA, 336 bp, Gossypium hirsutum
gattggctgctaagagacacctctttatttgtagtaaaaagatgatactatcggccgcagagcaacctacccggaaaagataattatccatacgcaaacagcactgaccaaactacaaaccaaagtgcctaccattaaaatatcaatcatgttttcaacaccgtgtttttgtttggtcttgagttcttttgtcttcactcttaagctgtcggtaatgaattaatgatgcatgccactgccacatcttacacatttatcaacaattttttctaataaaagaaaaccaactatttatttataacccaagttttaccaggacctatatatatatataca

SEQ ID NO: 13452 - DNA, 475 bp, Gossypium hirsutum
gttttggtgacggcattgttagaaggagcagtcatgaaccccgaatatagatcataagaaagacataaaaatataaaaaagaggtcgttgacgaagccacaaactaaaccttttccaaatcaaggcttaagggttttttggatggatgacgagattagttatagttgagtttaaaacaatggtgacaataagataaattattgtaataatgaaattgattattgtagcaataaaaatggttaatatgacggtaaaattaaaaaaatgatgagatgcatattttgattcaaacacaatagtgtgagatagaaaatattaaaaactacttgaaaacaatgaaattttttatttaaaacaataaaataaaatttattattattagaaaaagaaaatatcaaattgcacaatagatgaaaagaaaaatcatttctttgtgatagttttatttcctgagtggattaaaaaaggatcagta

SEQ ID NO: 13453 - DNA, 615 bp, Gossypium hirsutum
  misc_feature (610)..(610): n is a, c, g, or t
cgctcagaacagcccagcaaggttgctcaagagaatgggaaagtttttctcagcgagccaacggctgttgagaagagctcttcatacagggaagaaagcgattttctatctgatctcaatgactttgagaagaaggctctgtttgaactcaaatcccagctcgaagaagccatcttggaaactgcttgttaaagaaagaagatcaacccgaaaagaatgatgggaatgtgatgaaagctgaaaaaggtgatgaggaagctcaaccagaagatgcgggtcaggagaaagcaacccaacaatgcgaagagaagaaatttgaagaaaaaaataatatcctttgcctttggggagtccctctttttcctagcaaaggtggagaggctactgatgtaatcttgttgaagttcttgagagctagggagttcaaggtcaacgatgcgtttgagatgcttaagaatactttgcagtggaggaaggatggcaacattgattcagtgttggaggaggagtttggggctgagctagggtccgccgcttacatgaatgggattgataaggaaggccatcccgtctgttacaacatctatggagtggttgcggatgaagagcnatata

SEQ ID NO: 13454 - DNA, 657 bp, Gossypium hirsutum
ttcggtggaatacctgaaaacatttacaccggaaaactttaagctatcaaatcctcataccgatatcaacattaaaacatgtaggaaggcgggaaaaaaaaagcgagatataaaccttccttgtcctggatcttggccttaacattgtcgatagtatcgctggattcgacctctagggttatggtcttccctgttagggttttcacgaagatctgcatttttttcaaaccctgattctgattctgcttctgtatctgaatctatctaacaaagatactgacagcctgattatggtttgtagtgaattctttcttagccttgggttttggccttttgggcttttctctgtgacacagtctaaatgaaaattttcaaaatagttcaatcatccttctctaattttttttaattaaatgattaatatataaatttatttaataggtaggtgatatcggtgtaatttatgtaattttaaaaagttataaaataataattaaaatatttaaattttttatgtaagtattaaattattaaaatcattattatatatattttttatttatagtctaaaatgataattattatataatttataaacaggaataaaatacatttcaacacaattaaagttacgtcttcctgcattaacaatattcg

SEQ ID NO: 13455 - DNA, 721 bp, Gossypium hirsutum
  misc_feature (474)..(474): n is a, c, g, or t
  misc_feature (476)..(478): n is a, c, g, or t
  misc_feature (490)..(497): n is a, c, g, or t
  misc_feature (502)..(503): n is a, c, g, or t
  misc_feature (506)..(509): n is a, c, g, or t
  misc_feature (514)..(519): n is a, c, g, or t
  misc_feature (521)..(528): n is a, c, g, or t
  misc_feature (530)..(532): n is a, c, g, or t
  misc_feature (536)..(541): n is a, c, g, or t
  misc_feature (543)..(544): n is a, c, g, or t
  misc_feature (555)..(560): n is a, c, g, or t
  misc_feature (564)..(567): n is a, c, g, or t
  misc_feature (574)..(574): n is a, c, g, or t
  misc_feature (648)..(649): n is a, c, g, or t
  misc_feature (683)..(688): n is a, c, g, or t
  misc_feature (690)..(701): n is a, c, g, or t
  misc_feature (706)..(714): n is a, c, g, or t
tttgaccacagaatccctaggaagaatatttttcaactttaagaatcaagccatgaaggttttaatgttcaaaccacctatgaagtagtttcagtaaatgacccacttcatgcccacatccctaaaaggccagaagcagtagatacatttatgctatgttctgaatatattattgcatcttctgttctcccaagactgttagttcaaacaaaaacatttgctcttttgctgctcttccttatttgagcatcgtattaatgctgtccatctctaacaagtaacaagccacaccaccatggtcacaactactttgcaacaagcacactcattttattattagattttctttttatagttggttagttttgatcatcttgtttttgtaggtatgacctctacatcttagttgtcttggagagcatgtctttcttggctaggagctttaaacacagaatatcgagaacaatcccagantnnncatctccggaannnnnnnngaccnnatnnnnccacnnnnnnannnnnnnncnnntatnnnnnnannttaaaaaccgnnnnnnaggnnnntaacacnagcataccacttaatcaagagttaataatgttaggtccaatttgaaaagcttagtgcttccaaaaaatgctatnnatgatgagaagattgaccaagattaccctgtggnnnnnnannnnnnnnnnnnctctnnnnnnnnncctacct

SEQ ID NO: 13456 - DNA, 652 bp, Gossypium hirsutum
atatctttccctcttccgtcttctttggtggttggaccttgtcagcctccaagatgtttaaataccatttctagaaaaagaataacgaaatgacaaatagaaaagatctaagctacactttaaatttcccatacagtaaccaagattaatagggttgtatattgttacccttgttgtggctcgcattctctcgacatatgaattcatgagaggatccatggcaccactctcagaacacacttgagcaagagtctcatcaacaccaagcccgattaaactttcttggtattcaactacccacccagttacctacatgcaagcaataatacccataaactactaaagttacatgagttaaaacaagatagaaatacaacactgatacaaagttaagaaaaaggttgtgccataagaaaattaaattaaaatgttaaaaaataaatgaaactcgaagacatcaaaatgaaagtgattaactgacttcttaggtcaaagttaattcatctctattatgaaatacaatacttgaagatatgcttctttccatgttgctctgatgttagttttctgtcttatggtcaactacagtgacggataaatcaggagatacttgtcgtaaaaaatattcgctttcgcaaacttagcccagtag

SEQ ID NO: 13457 - DNA, 501 bp, Gossypium hirsutum
ttctcttctcgaaaaaccattttgttaacatttattaatttgaaattagggtaattatttagttattatatgttgcagaggccttgtcgtcgtttcattttcccggaatccatcgttttatttggatttgctgaaaaacaaaggaactgacgtcgcttcatcggataaacagtgaatttctttttgcctctaataattttagatggttacagtgatccacttggttggaacgatcagttagcagggagtggaaactccacagctctttccaatgaagctttggtttcgaggactgctaatgtttttagggaagttaaacatatggataagttgtacaattcaattattgaacttggcaaaggtaaatcttttgcgaatccttttcaagtttgaaagatcaacataagcttttgattgtttgttgagtaaattcatttatggtttttgttgggtatttttttattgttgcttttgattgtttgtaggattggtaggaggtgg

SEQ ID NO: 13458 - DNA, 664 bp, Gossypium hirsutum
gatgaatcgatgggatctactgaaaaaagaatggaagctatggaaacagctcaaagggaatgatacctgtttgggttgggatcctaataagaacaatattgatacttcagaggcatggtgggaaaaaaagttaaaggtacatgattgattttcataacgaagattttattaatccttttttctattttctcgtatataagatcaataacactcatgtataaatgtgcagctaatgcctgaggctacaaagttcaaaaatggtggtattgatccagaattagaaaacaaattagattggatgtttcagggtatcaatgacgacgtaactttcacacccacatttggtctaccgtcgattgatggaactgatgatgatgaaccgcctaaagtagaggttgaggaggttgtcgctgtagaagatattcaaatgtcgaaaaaggcaatgggtgaacatttcaatgagatggataaccattgcatggaacagaatcctcaggctcactccgaatccgagcaccagtcagagccacctcaccagaaaaagagatctccagagtcagattcttctcatctcaacaagggtaaagagaaagtaccaaaactaattgggagagtttcaaaactatctaggcagatagatagattgtgtagtgcagccgaaaaa

SEQ ID NO: 13459 - DNA, 458 bp, Gossypium hirsutum
tttaccttccccagccgctataagagagagggcatgagcaggggatagtacaacttcttcctttactccttcaacaaaggttccctacagccataaacgaagcaaacaataaaacacacttccaaacaaacaagaaacacaaggcataccgatgataaaaactaagttgcatatacccaatcactgaaaaatattttggcttatgtgattatttaggaagccaaaataaatgtttaattttttaggtaatattatctcataaattttgttcaagttaaactactatactgatgagggttaaagataactgctcaccattttcttttggagtagcatttaactttacctagttactaggtatgaggcctaatctagtccatatatattacctgtgaaccatcaagtgagagatttaataagtgagaagcaagtacctgagcatcttctctaattctcaa

SEQ ID NO: 13460 - DNA, 633 bp, Gossypium hirsutum
aatttcatgcaataataatcaggagacagtaggtgggactggttgacatggaatcaagtgaagaacaaagacatatatgatcataattttgcatcaaaaacagttccattatctattttggttttctcttttaaacaactcatatatagtaatgtacgaacttgggtctagtttttcctttttaattttataaagttataataattccaattgatttatttacagtgtggataaaatttgaaatatcaaaatttttagagtctcaatctgctaatttatatttgatattatatgttcaaaattttcattatcaatatggttgaatcaagatcaaatcatattaacttttttgttttaaataaaataaataatgaaaacatgaaacatgcatataataattttaaaaaaaaaactctcatccttaccttttttttgaaggtattgatatcacaatgaaatatttactaattaaaaagaaagttatatgtgaaaaagaagaagttaaattaaatccctaatccagaaaaagtgaagaaccgaattattgaaggtatacaaaggtaagttgagattacacgcaaattatgtcagcgtgcccatggaggatcaaattcaaatcccttgttttgtgcc

SEQ ID NO: 13461 - DNA, 642 bp, Gossypium hirsutum
tcaagtccgtaaagcttccgaatggtggcttctccgtcgtcttctttgtcactaccctttggatatgatcttgttttaggatatagccaaaaaccagaacatacatatgtatagggacagtactaaaaaagtttacctcttgtatctttgaacctgttgattgtttcctcaaaatgtgatgttccattgcttgagcacttattttgttgcctccgacatcgagagttgcctgaaattcgataagatattattacttaaccgatgtgggataacactacttttaacatgcaccccaggaaactaaattggaagatgtaccttgttcatcatagccaaaagatcttcagaagtatcaggtagaccatattggagatatccctataataacgaaatgatcatttaggcacacataatgcaatcacctctctcaaaatgacaaaaacaaagctaaaagtaacatggagacttctgtactaagagtcaaattgtaattgaaccattttattaacaaaaaaaggaacaaattaattcctcctatatattagatcaaagaaaaaacgaatcattctattataaaattcattcatttctattgttaaaaactagtacctatatgtcagcttacttcattagtcatgccag

SEQ ID NO: 13462 - DNA, 569 bp, Gossypium hirsutum
  misc_feature (70)..(70): n is a, c, g, or t
tccccgtttttgagcttatgttagtatgattgttcataatgtctcgaaccatccactcccggatccccgnattgacataatggcaaaataccggactggattgcacgcacattcagccctaatcacacacaaaaaattaatcccatatttatatctgaaaactgaaaccaaacttgggaggactaaaatcattctcttacctgctataagttttggggttcggatagtgtacgtaaggaatttcccatggctcaatattaggttctggacagggcttttggaccactctaaaattcaaaaattcagtggtgctgccagtgcttatttgcttcaaacaaatcgtgcagatatacactccacaaaccattacaaaaaacaatacaaccgtcctcaacaccaatggagacttcttggacgactttaggatgaaagaatcctgaaattcaatgaatctgccagatattaataacaaattataccaataaagcaaaaaaaaaaaaaaaaaaaaaaaaaaaatttttttattgaaaaacctttaaagggactttgggaaaaaaaaaaggggggct

SEQ ID NO: 13463 - DNA, 500 bp, Gossypium hirsutum
gaaacaccttggtgagtaacgattctacttcgtgtagcttgtaaatatgtcctttatgttgcttgagttctttgtttttttcttaaaatacttgtgtctatatcaaacacatgtttggacgttggtacagccgtatgactctttaaatatatgaaagaatttaaatttttcgaatgtatccgtatcaatatttaatattcaacgtagaatatgctatcaaattttgcctttgtttgcttttttctttagacacttccccgagtacggatacagggaataactttgaaaaagttgaacatatccatgtcagatacagtggctggccttggccccctcccaaagtggtagaattgctttagagtccctttagaaattgtcagaaaacaaattagtacagtagtatattttcattttggtccctccaaacatttataatttacttctttcccctctaggaaaaatttttggcttcacctctggtcgatatatgctctgtatct

SEQ ID NO: 13464 - DNA, 605 bp, Gossypium hirsutum
tcattctctctgatttgttccctgttcttttgaaatagtgtagtacctaacacagcttaatcagggttactaggtagaaatgcattacttaggagattggttataatagcagaataatatcaagccttgttaaaggtctttcggtcagtgttcttatacagcaaaatctaacagcattgatgttctgtgatttgcccaaatgtcgagaaagagctaaaatcaacttcttcccgggttaagcaaaaataagttaaagccatactaattctttgaatttgatatgtagttttccatattcacatcaatgaaggtgggcaagtcggactagaattttgttgaagttgctaagatgaaagaaaagtaaccaaacatcaagcgctcatggagcttactaaatccatacattaatcataaacaatcagtggtatgtagcaatgaaggataaaatatcattggtgaataattcctaaaatattagaaatgcagcatataaggtgctaagaagacgaacaaagaaaagtacctgatcccgaagagatgggagggaaccaacttctaaatctgcatttaggctacagagcagtttatccagatcagaggaacgg

SEQ ID NO: 13465 - DNA, 676 bp, Gossypium hirsutum
ccactaccagtaagtttctctctttctctcatcatattcttctttttcttatcaaaatgatagctttaacaaatttggaagaaaaaaaatgatagaagtgacctccacagccacgcaagtaaacaaaaacccattttaaaaactaaagaaaaaaggcctttctttcacatgaaaatttgaaaaaccatagctttcttcagattttgagaattatggtaaagttaacccttttatgttttgagaaaaaatggagtgcttgagcttaacatagttaaatgatttcgtcgagtttctaagatattcttttattctccaattcaattcaaagggattgtagagaaagtaaagaaaatggggttcaatcctgaaaggtttacttttattttagctgttattgttttgggtttaatgagcaaattcacttgggagaaaaagtttgatgtttataagaaatgtggttggtctgaggaagagtttttagatgcttttaagaatcatccctcgataatggtagcttttgagggtagaattaaaacattgatggatttttttgtgaatgtaatgggattcaaggcttcatttattgctaaacaattttattttctaggattgagcatggagaagagactgtaaacgattacaaagtagaggggaagggactataaacggattaccg

SEQ ID NO: 13466 - DNA, 679 bp, Gossypium hirsutum
ccgtgtatttatcaatgaaaagaaattaaaagcggaaatattttcatgacaataattgcatcaaagcttctatctatctctaggccagcttgaagggtccataattaattaggcttctacccctaatttttattatcagttccgacattttggcgtccaattttaaactaaatttttatgtgataaatatgttcaagtgtgattattaaatgctgatattattataaagtttcatattgaatttagtgtttagaattatctagattattaacttatttgtgtttaataatggtttgattttactttattataaaatttctaattgaatgtgatttgtagttgttagaataatcatgaatcaaattggatgttaagtggcaaaatatttcgatagaaacatggatttggttgaattagcattttctaaggagagtctcattcatatatattctgcaagtcgtaggcctaaatatacatgtgtagtttctgctccttccaattatgttcccacaaaaaatccggaattattttattaattctataggtgacggtattaagagccttaacacatgagaaggtatattgtcaccaccctgagataaccattaagattttcacccaactaatttcctttagatacgatcaataattgactgaaagatggcggagattgcagctt

SEQ ID NO: 13467 - DNA, 428 bp, Gossypium hirsutum
tattaaaacattcttttatatataaagtaagttatataattttaaaagtatttttatctttttaagctttttaaatcaataaaaactcaattacaatgaaatgttatttttttcacccaagtgggtgtactagaatatatatggaaaggaaagcggattaatttgtaagtgaggtgagctgctaaaagatgtgcatgcatgactgtggggagacatctaatgaagactagcatgcatacatatatatatttatatatttatatataatatgtgaaacatactcccatgggacatcgcccacgagcatccagtcgccatccttatcttcataggttggcacataatcagaactgttgagaagatccatcaacttgctctcattcatgaagtctatcattccttcacatccataactcccttcaaaaaaa

SEQ ID NO: 13468 - DNA, 667 bp, Gossypium hirsutum
tcacaatcttgggtgaattacccaaaaatgctgatttttaaccgtaattatcggattaggctaattttttttgtgaaatttaccgaataaggtggattttggagagagccggacgcgttttcagtggatataataagaaaatgcttctaattaaacatgctcttaattatggctagatgattaaatgttagtatttttatccttgagtttcgggttcgattcctctcttagacatatttgtatttttttatgttacttcaagctttttaaatttttaattatttttttaacgtattaattatttggttagataattagatagttgatcattgagtcttaggttcgattcttttcttacttacatttgtattttgtattttttatgttgcttcatcaagttaatatgttaaaaatattaatcaaaaaaattgatgaagaaacttgaaatattgagactcaaggaaaactgttaaaagtaaaaccccaactagttatatagagctatctatctcaccaaccaatctagaaggttaagagtgggtttggatggacggtggagtgtgatacatttaatttattttttattttacgttataatatctaatttcaccgccactattatttttacactaattatagataaatgaaccgtctatccaaatctttc

SEQ ID NO: 13469 - DNA, 642 bp, Gossypium hirsutum
ccttttacaacagttcaagcagcagtaattttaagtagtatcagatttctcggtaataacaaagagaaaccacaaaagggataccattatgagcaacaacctaactttctgagtgagccactgtcttgggagtgaaaatgtacatatgacagtcatgcgaatcaactttagcaccaaatgatgccactgcattttccttgacctctttgtgctgcaagtgataaagataagtaagcaggtagttggaaactaaagaatttcagtcaaggaaatgtatgagcaaaacagaacgaattgtagttggtatgactaaaatttcctactgcaatggattgaatgttcgataaacttgaacaggtttccagtttggtgaagtttgagcaatttaatatcaacataccccctcccacagttcgacaggttacttgcataagtcgaatatctatcgatgtttgggaaacccaagcaaagcttcattagggtgagagtaaggaatatgtgtgccttgttgattatctagttatactttgcatgtactttatgtaagaaaatacacatgattctggttactcaacaccaaaacagacacttaagccatcctggctctccaacagcctaagtagcttgaggaatcctgggacg

SEQ ID NO: 13470 - DNA, 654 bp, Gossypium hirsutum
  misc_feature (588)..(588): n is a, c, g, or t
  misc_feature (591)..(592): n is a, c, g, or t
taaactgcatttccctttttaatataatatagccccattatcatccaagtaaaaagaaataagtagacgagataacattgacattagtactaagaaattaataatagaaactatacctactaatgattaataaattcagcacctttatattaactcacttttttcccaattttattatctaattgattgattagagcattgcaattgacatcaaaaggtccaacttttgaagcatttcaaccccccccccaaaaaaaaagtgtagctcaacaaggacccacacattagggggagcattaaaactgtattatcctgcatctttagtcttggatttcctgtggtataatattcatgttgagcccaattacctatagccaattggtgtcaggctggcggcttatcaaaacataattaaacgcagaaaaactgactatgcagcatgcattaatttaattaagcacctcttctaataataagagagtagaagcatgacgattgccaactttatatgtatgtacacaataaactatgtatgtgatatgctattttctatgtaaatattacagatatagatatatgatcagcatnacnncaagaatttgcaagttataaatcatcaataaccttcaataaaacccatatttatcaaatacc

SEQ ID NO: 13471 - DNA, 440 bp, Gossypium hirsutum
caagtcggtaagtaccataaattattacacacaccaaaactggtgttagaagaaaaattagcctcatattaggagaaaacaagattctcaccttcacaatacgtaaactcgttcatgcaaaaaagtaagtaacctgcacaaataaaaatacaacaaattagaaaaagtatatgtaataactttagcagtagagttaacctcagatcctgctcgaaactcaacatctttgggacctccgccaaaggaaccttctccaactacaactattattgtttttctccttctatgaagttgaaatgttagtctttctatttcttcagattcttctctcaccacctccagtttcttgtgctcatttttgtaatcccactttcactcgggacaatgagtatatgttaccaagcaaaattttgcttatagtatttgctctgccataaggc

SEQ ID NO: 13472 - DNA, 564 bp, Gossypium hirsutum
tagtttttatatattatttccattgagacttctattgctcacacttcctttacttctgagaacggtttggtttttttctcaagtaattaaaatactacaatcccgtaaaaggtgcatcttcctcttgtattgtttgtacttttttgctgcccattcctcactctagtgctcatccttatagactccttccctctgaggtggtctcctgatgaccatcccataaaatttttattaaccttttttaagaaacaccttgaattactactttacgagttacaaattggatttgagttttgaagcatggaaaaattatttcataagcaactatattatcctgactttgaaatcccactacttcatatactctagaattgctttaggatttttttattggcttaggtagggagtcagtgatgtacttcaatgagcaattgtagttgcattgccttaaattatttgagatcaatctacaaggtctgtctttaagtgtcttagggttcagtgtactgtttattaatttttaagatgaattcattgcataaatctatccattgcaacttgctt

SEQ ID NO: 13473 - DNA, 664 bp, Gossypium hirsutum
ctcaacgcgcctcccttaccattccacgcgccacctatcttcgttttcattttccttctctttcattttccttctatcttaaatgaaatgagaaagatctgaaggagattggaagttggtgattgagatttgaggtttctgaggagagtgacttattttggtaattttaatgaaggatgaacaacgtctggtgctaagaagaagatgggaggagtaacgtcttcgattgccgcgaaatttgcgttcttcccgccaaatccgccgtcatacagagtgctagaggacgagttatgcgctggtcagctttacataccagaggtaccgaggagggacggtgtcgacgtcttgaagctacgcacgcgccgcgggaacgacatcgtcgccgtccatataaaacaccccaaggcttccgctactctcttgtattctcatggaaatgccgctgatttaggacaaatgtttgagcttttcgtcgagttgtgtaatcgcctgcgggttaatcttatggggtatttttattttctttcataatttttgcaacatatagaacatgatattttaagtcggcttcttaggcttttactgttttaattgtattagatttcttttagcttagtaaagtagttcgtttgggtttggtctgatttgcttgagataaaaaaaa

SEQ ID NO: 13474 - DNA, 680 bp, Gossypium hirsutum
atgtggatcagttgccaatttcaaaacttaacttggacaaaaaaatgtttaaaccctaatatgagaataattatcaagtttggggcctaatttgaattaaaaaagttgtgaaaaagtgataaatttaagcctaaaagtttatttaaacctaatattaataaataatttataatgctcaaacacgtgtcccccgtgtcatattttaatagcaataataccacaaaaaatatcagacatgataatagtgacatcccatgttatataattgtcctgcaactctcctcttcctccacaatctccataaagtaattccaaaacccaaaatctccttccttcaacatctcatccatggccagagctctctcccacatccatggcagcccagtattccatgttccttacacaccgattcccacacgtcaatttccttcccaattgccttgtaggcttttcaaagtcaccatgtcaagcaaccaatcttattggaccaccataaacgctgacattgaaactcatctcaagcaagccataccggtacgagaacccctctctgttttcgaacccatgaaccatttgacgttttccgccccacggagcactgctcctgcattatgcgtggccgcctgcgagcttgtcgggggtcaccgggaccaagctttgcccgcggcatcagcacttca

SEQ ID NO: 13475 - DNA, 666 bp, Gossypium hirsutum
caacttgagccaagtaaccatcaccgacgataatggcgtgtacagaggaagcaaaactcgagcacttccttcaatggcttcaggtttagttctccaacaccctgaactcaacttcaagccgtcaactctacatttctattcctctggttcaactaacagtgattttaattcaggtaaacggagctcaattccgcggctgcaatatcaagtattgcgactccaccaaaggcttcggtatttattccaccaatggttcccccgaagatggtcagtagcaaaaagccctttaacaaagaagttaaaaaatagaattctgtttgattctttgtaaggttttcataaattttatgaggaaaagaaactggccaggggttcttcttgttgttccactggatttagcaataactccaatgagggtactgcaagatcctttaattggagcagagtgtagagcaatgtttgaagaaggagaagttgatgataggttcttaatgattttatttcttattgtggaacgtctccgaaagaattcttcatggaaaccgtacgtacttaacttatgtgattggcattttagtgttcttttttttccctttattatttatgtggattgaaaggttgggtcaggtaccttgatatgcttcctactactttcggtaatccgga

SEQ ID NO: 13476 - DNA, 671 bp, Gossypium hirsutum
ccaagttactaggcaaattagtggtgttaggtaagttattaggtggtaacttgtttgttttgctattgtaatcccttatatgtattggcatcatgccttcttaaaatgttaatgaaaattcagctcattttcattcaaatctctctctttcttttctgttttccattgtaagtttttttcttccttgattgtttctgctgcaagcctcgagacttgctgtttaagcaaagctaaaatcagcttgctgctgcctcttgcaccaacatatatatatgtatgtactctcaattaccataaccgcatcctgaggcaactatattctactattgccgttatcttctagtcatggatagcagaaacggcagtgtacgttaagagccttgatgcaaagcacatttggttgaaattggagttgaaggattttatggtccctcagcacctgcacgagcacagtttaacccgaattcgtatgcaactcaagttgggaccgacttcatacggaaccatcagactctcggagttgattttgcttctgttcacatttatgcagattcctggtaaaagctatctcatttgtctattcttcatatcatgtgtatgacaacaacttaaatggatgatttggtgaattttgcgaaggatttcacaaacaatttctgatgctcatctcc

SEQ ID NO: 13477 - DNA, 654 bp, Gossypium hirsutum
ggttctgccactatagaggaatttaagttgctacacactattcttcatgttaaggattttaacttcagacaaaccttgagtgagtcttttctagtcaatgaaagcaccgttgatggaaatgataagattagtgggatagaaaccctgcatggcaaggtgaaattaagatctattaagctccacaggtaaaaccaaagaaaaagggtgacatcaacacactaaaactaccactcacctctcagagagacaaaaggcataaagcaagtatgaaaacaagttcacaaacactgaactcaattccagaatatgaaaaataaagctaaaacttcagcaaactagagtctagagcgatacaaataggcatgtgcataatttcttgctctctttcaagaatcaactagaaaacgtattattcaagagtgacagaaactcaaccaaggttaagctttcactattgctaaaagctatttggatagttacataacatggtagcaaaaaaaatgttctaatatcatcgtcaaactattttaaataaatgaaaatacattaaagctgcctaaagaaaagccttgcctgttgctttccaaacaagctaaggagtctatttggttgaagaaatctttggcatcaccaggaacacaaataccaaggaag

SEQ ID NO: 13478 - DNA, 681 bp, Gossypium hirsutum
tgccaacaacttatccttctacgagctttgggtctcatttgtatcattcactttcatccccttatcatccacaatgggatcatctggatcaagaggttcatccgatctatgtcgaactttttttaaagttcttccaccattgtcgataagtaaaagagcatcctcgatcaccatttttgtcatgtgaagtgcataattttccattaaaattaaaattattagtaatgttattagtattgcttaataaatcatatttgatcattagtgatatgtataacactagttatcataatatgtcattatatattttatattataattaaaattagattttatagattttaataactattaatttaatttatacttttagtatacatatataattacagtattaaaagcattttatattcaattaatgtttttaaaaatttatttcactctataatttaatataaaaatgtattttacttttgctattaataaaattttaataaaaatatgtaatgttttttattttattttaagtagtatcataaaattatattaattattaatgtttattatgacggttcaacaataaattcagattttggatcggatttatcttgagttcagtcaaattgttctcgagctcggattcttagagattcagactttctcgagctctgatctattgaa

SEQ ID NO: 13479 - DNA, 656 bp, Gossypium hirsutum
gcaacaaactagggactaaaatggaagtgcccatttcacatgtatctttatcttgtcttccaggggattcagttacgaggagaaggatatatgaaataatagtttgacgtaagacaaaggcaaaatgaatatccaaaagggaaagaatatgaggaagacacatgggaaggttttgtggtagagtcgagactgatttgtctttatcaaggccccaaagtccaaacagcatttccatcgaacaggcagcaccactatgaaatggtgggataattgcttagaaactgtgaagtttgattggttacattgtccctcacaccatccactaaaccccaatattttcaagataataaattattgacagcgagaagaccattactgcaacagaaattttgttactaggaaaatttcaatcttacccgtcatccacatttatctagggtttactttgacagtcaccaactccccactaccttcaacatttactgtatcggatatatttgtttaaatgcaaaagatcttagggtttttcctttttctaatatgcttgttaatgaatttaaaaattggtttaggtttccctataacttaacatattatatttttaatgttcatgtattatttatagatttaatcctaaatgttgtctaaactgaacc

SEQ ID NO: 13480 - DNA, 610 bp, Gossypium hirsutum
ggattgatttggtctgtgataaatttactgaatttatatggatatatgtgattgatgtggaaattgaatattgaatgtatgttatattgaaaaattaaattgattgggaatgtgatgaaataaatatgaatatgtgattattgtgaaatttgaatatatgttattgaaaatgtaagttcaattgtatcgatttattaatttatgtgattaattgttatttttttaattgaaatatgtattgattgaaaactgaaaatttattaaaatcctattaacagtatagggctaagtcggatatagttggcatgccataggattggaagtgttcagggatacttcgaccttgagtcgatgaggcactataagtgtcgcgctgttacttcgactttaagtcaatgaggcaccttgtgtgtcttactgttactgttactttgaattaatccgatgaggtactgagtatcgtactgttactctttacttcggcatagccgataaggcactgagtgtcgaattggtgtattggttggatccgtgtatccgtctatatccgagtcatgttaataggggtaaataaaagtactgaatgactgatttctctaatggctgacag

SEQ ID NO: 13481 - DNA, 611 bp, Gossypium hirsutum
tgtatggatggttacctagaagccgaacaatctgtgagaaaataaaatagaattaacatacaactaacttcgctagaatcaacttaattgtaatacttaacaattaacatacaactaaacaacacattgtatataaactcaaacctcagctccagtataaccactagcaccaaggagaccaatgcggacttcctttttgttcttttctgaagattgcatgcattttgttgataatactgaggctcctcctacataaaactttactctttggtttctattcttcacttttgaaatcttcacttctccctaaaatttggaacacccaaagttagattttggagtaaaagaaaaataaaaaaagaagatatcttgaaactaatgaacttggattttgtgcgtgtgtgtgttttcccccaacattttctagggaaacaaacagaaagcttttggttgaaaacaaacgtaccttccgcaaataaccttgattgaaacaaattgaattgaaagtagcagtgctcatttttccaacaaaattctgaaccccaaaatccaaagacaggaaaaaagaagaaaggatgatggttgaaatattagagaacccaaatcaaatc

SEQ ID NO: 13482 - DNA, 561 bp, Gossypium hirsutum
ttcctacttaagttcaaggcagagcctacagctatgctctgagcagctaaactcttcctagaaacctcacaccagcgaaacaatgacccagaatactgggggtaacaagtcttaaagcagctatcctctccagattcttggaatagaagtttattctttcttacgcaatcagaaagaacttgctttaactctggacggataaccttaataaatttctgaaacttttcttttgctaataagtgactttttgcaccgatatcattgattgtacttcgtgtttcctccgaaagacgtaacttgggatcttcaaaagcttcctttaaattattcaaatcttgtctgcaacttatccataacagctcagcctgtatgtaaacaacttaagaatttcaaacactggtaacagaaggaaagaggacttagtttttacttcaaaaaagcatctcaatgtcctaacctattcacagttcatattacaagcgttgaccttattaataacaattgtcattacttaacatttgttttcatgatttatgttgttaattctcgatgccaccgata

SEQ ID NO: 13483 - DNA, 647 bp, Gossypium hirsutum
gttatttcgctaaaagaatttcaacttaatatgtttattttttgtcaattatataccacgtcatataaggacaatataatcaacatgtcaagttgacaaattttgatggaaaatactaacgattttagtgattgggttgagattattaaataaaaatgtaaaaggacttcattttaactttttaagtatagggactaaatcttaaattttattaaagtataagaactaataacatattttaaccagattaaaatatttgtctttttatattctttgaaaacttaaaagttagttcaattgttgataaatacatacattcggagtattactttttgctaatttattgtgtctaaattgttgaacaattgaattcttagattaatggttttacaacaaactttaaagtattaacaatcagactaattctcaattttcacaaaatgaaaggatcaaattgcgatgaaataaaataaaggattagtttttttagttttcagggactaaatttataattagataaaagaaattaggtaatattgtgtatatgttttgtgaagtgataaatggctagatgagccaatgcatgagaaggaatgagatgatgttggacccacaattgcgggaaatggacaaaaaattaagaagat

SEQ ID NO: 13484 - DNA, 584 bp, Gossypium hirsutum
  misc_feature (33)..(38): n is a, c, g, or t
  misc_feature (577)..(579): n is a, c, g, or t
tgggcaatctcaagtatcacttataagcagagnnnnnntttgtaggggtgaactacctgtttcatccaagggattcattgaagatcttaagatattagtaatcaagacttactctaatcttgtgaataaaaacgattgaccaaataattatatttattgcattgaattctttaaatttgaaaataaataatatttagatatttcttttcatttccaagtttataattattgtgtggtaaccaatcacacctttaatttttaaaatcacagagttcagattaaaaatacatttatgcctcaagtcttctttacactttgctaatgttagtatacatccaaccatgtttccaaagaagtaaatttgtagtaaaaggttttttttaataaaaggaattaaaaaattatgggtaaattattaaaatagttacttttgtttgcctcaaattatatttagtcacttatgtttgaaatgtgtagtcttacattatcgctttatttatgaaatggtcattctatcgttaagatctattcctcccaaatggcaatccaacgtgacagttaaaatgagttttaaatnnnaacgt

SEQ ID NO: 13485 - DNA, 559 bp, Gossypium hirsutum
ttcaaatgaaaaaaaaaatctaattattaatctttcaaattgactaaagacaatctccaagaagcattagtcatttagaggaagaggatgttagctgtcctatagcaatacaaaagcgtaatgctatcatatttcacagctaaagtttaagagttttctttcatattggaatctagtactccattattttctacctcattatcaaaattaagatattaaaaccatctattatgaatctaagggctcgtaaaatatcattaaacatagaagcctacaacttccccgtagatattcttatccggatttaaattctctcgtacccttaagcatttcagattttcttaacgttgaactatacaggatttagactaatctgatttacaaaataccaataataataataaagattcataatttagagtatttgaaacttaaattattcaaatttctacagttctcccaaagcaataattctccaaatatacgtttctaaaatctccgaaattacggcattaaaaaatcgcttcactcaaccgaacccgatccaaccctaattaaa

SEQ ID NO: 13486 - DNA, 651 bp, Gossypium hirsutum
gaaagctagctaggtgttgctgatgctcagcaagagttgcagctaatgactttgaaagttagctaggtgttgctgatggtcagcaagagtagcagttaatgcctcagcatgtccaatagtgccaccatcatgcgcaattagtaacatatcaggaccttctccatcattagcttttgcctgcaaagcaatagcaataccattattgcatactagcatcttacttcaacactgataattagcaacatgaaatccataattccataaaaaagttaatcataattttgaatttctaaattatttttcaatactttagaaagcgcatactgaaaattgctcatttctgatataccataacagatctcttattcacatctcaaaaagaaggaaaactttaattgaaggactttgtttatcacatagaggtcttgttcattcgaagtagaacacccagcggaaatttcattgccacaacttcaaaattaatgttgaaaaatatgacgtatcattaataccataaattggaaaaatatcaaattaataataatgtgctatataccattatggtattcaaaaattcagtaaagttctggtggccaagtagctatataccattatggtattcagaaattcagtaaagttctggtggccaag

SEQ ID NO: 13487 - DNA, 315 bp, Gossypium hirsutum
  misc_feature (8)..(8): n is a, c, g, or t
ttcttacntcattcattcaataaaacatgacagaacataagtaaatttgtttgctcctgacacaatctcaacagaaaacaaaatgaagccaacattggtcccctaaaatgatccacaatcttcaaatacaacatggacaaaatcatgagatcaacaaatgataaaatgctcattacaaaaacatgcaacttgtttaatttttctaatgcgaacagtgcagataagctaccactttgttagcttacaattatccagcatataattgatggtaatttatatccattaaaaaagaacctaataatgaaatgagcaatg

SEQ ID NO: 13488 - DNA, 618 bp, Gossypium hirsutum
atttgttgttgttttagtgctagtgactatttctgcttaaaaactcctgttgcatccaactatttcttcttgtgaaatttatggaattttcttttccccttagttagctttgggaaatatggaaaaagaattttagtggacattatagagtatctaagacctggaaatctagctgctttatattaatttatatggaagagctaagttagtgtgggagttatggagttccctgctttggcttacatggttttctctttttgtatagtttctgttgagacatcagtataaatctattataatatatggtatataagtgtgtgaatctatgtggacttatatgaaatcttctgtggtaattctagggccttttgtttgttcctgctttctttcctgtttgtgggggttctatcttttgatttcttccattttgaattttttttttttattttttatttttgttgcaggctttagagtgcccatcaacaaatgccaaattgatggaaggtagcatctttttgtaaatgctatagaggttgatcacagtgattcagtttctgaaaacccctgcaattccaatgggttaactgctctttccccctctgaatctgtagacaggac

SEQ ID NO: 13489 - DNA, 646 bp, Gossypium hirsutum
cgaaagtggcgatgtggatgataaattatcattgtaaaagtaccacgaaggcctttgtattaagagttgggattgcattttgcctattctatttcagaaaatgggcaaattagtccctatactttagatcaaagaccaaactggtacctttgttattctagccatttttattaataaaaattggtctataaggtgtgcatggcacaccatgtgtaactaatttgcctttttttagtagaggatgtaatctacctcctaatacaacggtctccaggatatttttaccaaattatggtattaaaagatgttatagcatcctagtttagattatgtattgagtgtgctctttatattcaaattgggttttttctccacttaccaagttgccgccggtatcaaagttcaaggcctatttttgttgttattgttttgtcatatagtaaactttttatcaaagtccatttactattttagtcaaatatttaaaagaagggattgatttgtttaatcaaaaatcttttagtgatgtaatcttttggactttccaaccaattttgttggtggggtctttgaataggatgaaatggtgttttcaaactggtaattgatgtatgtatttttttgtttgttcattgatggtcccatt

SEQ ID NO: 13490 - DNA, 645 bp, Gossypium hirsutum
ttacataggaagactatgcaggattgcaagcacccttgctttgcttgcgcaagctgctctcgaggataagattaatggtgctattggtcttgggaatattgaggataatgttattgattactggaacatcagtagaattggggactactgtgctggtggcaagtgtgaagtgcgtgctgagactaaggcaactcggtctgattcctctgcgttgccatctacagaaggttcaaaatctatcttcttgtgttctcaatgtcggagcaaggcttgtcgagtttgctctgcagggagaggagcccttcttctgccaaattattcaagggacacgatgaattacaatggcttgtctaaccaagttggtctcactacaaatcgttcagaggcactggacagtgttatttgcaggaagtgctgtcatgagataattcttgatgcattggtcttggactatgttagggtcttgattagctcacgaagaaaagtccgtgctgatagtgcagcacataaagctctggatgaggttacaggatcctccttcctgggtagcctttctgaaaggagtcagtcctctggtaatcagagagctgctaaagttttgaaacaattacttaatagggaagagtcactcgcggagtttcattt

SEQ ID NO: 13491 - DNA, 462 bp, Gossypium hirsutum
  misc_feature (53)..(56): n is a, c, g, or t
ttgcatcatagactcattaatttgcattttcagaatattatgcatcgatcaannnntttgaccatacctgcaagcatattatgttgactcctgaagcaccggcagcatcaattattggtcccaatttctcaaatatagcttttttccgggctgaaaagggaacaggggttgggaaaacaatggaattttgaaaaaaaccgacccttacccggggttctcttaacaactctttgtcagcagaaaatttgaaagcctggaatgatttgaaatggaaaagcacatataactgccttctacaatatacttgtattgaaatgacaaaaatctacggagataataactacaagtatgctcgggacgtggcggagagaaaataattttgtaaagaaaaaagggatgtttctccccctcttataaaagaggggagtgaaagaaaatcaacatatttcagggagaccgggg

SEQ ID NO: 13492 - DNA, 651 bp, Gossypium hirsutum
atgttgaagagctgaatgcaaaactcagaaacctagaagtggattctggaactcaaaagtcaaacctgttgttgctgcaatttgtaagaaagatcctcgaccaccttggagtagtaagccctgttatcaggataaaggagatggggattcatcacataaagcatggaagataaataaatcaagcatatgaaagaatgtgagtataagtaattgacaaggttcagcctaaaatcattaaatcaaacatataaaagactgtaacattaaaccaagaactgcagccatccatcagaactacatggtccactgacattaatatgagtcaagcaacgtcctcaaatccatagcaaaaatagaaccaagtattgtgagttccatcattgtgaaggactcaaggcctcatatgttgatcaacatgtcaatatatgtggcatttctccagaaaaatgatcaagaaacccacaatttaaacatagatagcacgctgacaaacaagctacacatcatcttggagtttaagacagttttcacagtcacaatatgaaacagtgtagattaaattgttataagctcacttgaattacctcttttctattagtttggaagttaaactgattttttcatgttgaataagctccagtgtctgtatgc

SEQ ID NO: 13493 - DNA, 467 bp, Gossypium hirsutum
ttataacgactcagacccggaatacaaatattttttggcaatataatcaaacccaaattagtatgaatctccatgtccatagaaaaaaaaataaaaaattagggaaaaaactactaagaattcgaatgatatttttcaacgggttggaatccgaacaagctgtgtctgtataaccaaatctaaataatataaaactaaaattgtgtaaaaaaaattaccagatatcaaaaagttaaaaattttaaaaaaaaatgaacgggctaaaatgaaataaaaggaaacaaaattttcttttatgctattggtggatgggtaaatagcaattaagactcctctccgtatgttgattttgtcgagataccctgacataaaataatttttttttattagtcgagtatgttttaaatacttcataaatttacatcaacagaagtgatagggcaaggaatgaccattagggacaagat

SEQ ID NO: 13494 - DNA, 639 bp, Gossypium hirsutum
gccaagaatgtcaacattttggacagcgtgtccctactgttatatgttgtttgagtatcctaggatttacgaaggttgttgtttaaggtgccagaattgcgacagagcttttcatggtgttctcattcagactttgccgccgttgattcccgagaatgaagcttattattgtacctgggcgttctttccgttattgtccagtggtcaggagactgaagttgaacctcctccggggtttccagataagcggcgagggagtgaaagaaatgatggacgggagagtgaagttaaagctcctccagggtttccagaaaagcggcgaggggctcaaagaaatggaggtactatggccttgccaccaccggcttctgctccgacgaccaccatgaagaaggctaccgaaagcatcgataatgtggcagggatttcgggtgggaatgtgtccgattttgccccaaggaagagagggaagccgaggatgaatcctctctgaggtttcgtaggtaatggattatggttttttgggtttggtttataggcaacctaaccataatgcaggagttcttgcggtggagacagccgattttgatgaaggttgaaggaaggataatgctgaggctgcaactcccgatatatatg

SEQ ID NO: 13495 - DNA, 587 bp, Gossypium hirsutum
ttcacaacttaagggtatgactgggaaggttataaattgtcatttgcctatcaaaggagttgtcgttgactagcacaaaattttcattcacatagtcttcatcttcattttcttctcattctaaggtgcaagattctctttcagagctttctaaactccatttggatagacgatgataactgtggtgtgataaaattttttattttacaattataataattaattttgccgtcaccattattttaactttactaaaaataaacgcatcgcttatttaaaaaaacccctaatatttctcgttaacttaagtggctgtgtaatgatttccggcttcacaatcttaaccataagccgattatccctctcaaccctgtttgttaaaactcgaaaaaaccaaacctgggctgggtcaagatcaacgtcgatgctactgtctcaaatggaagaatgggtttcggggttattgcaagggacgacgagggctttgtggtgggcggctgtgggggctctaaagaatcgacgttgaatagcgagtgggcagagctgttggcgctaaaagaagatgggcagagctgttggcgctagaa

SEQ ID NO: 13496 - DNA, 341 bp, Gossypium hirsutum
  misc_feature (286)..(286): n is a, c, g, or t
  misc_feature (289)..(289): n is a, c, g, or t
ttttggaatggctccaccaatttctaactctacccatcaccattcttttgcttctgtttcgaggtcttccttaaaatagaagctacgaatgccgacgtttggtacggggccaattttttcctgccccgacttccaccagacgttaaaacattttaatgcctttggccgccccccaaactatacatgttttctcattttcctacctaaaactctctttttttttctaacttttctgcttattcagttcaatcattttgtaactgtgttaaaaactgattggtaaatngcncctagttacaaaattgccacttaattattcaattttatctttttagtcaccc

SEQ ID NO: 13497 - DNA, 766 bp, Gossypium hirsutum
ctaccgatctttgagttcctgctcgaattgaagcaatttctcccggacgggctgcaaaaaccgcttcttcaagtcctggataatctgctgcttgtcttgctgcacgaaatccttttcttcactaagctgtactgccatctataattatccaaaacggaaaagttttagttagtttcagtcatttctgccaagttctattatggttctaaaaagtcgatagattaccaatgcctatttgcctaacatataaccatggaatgaaaacaattgccctcccctaagattggttttagggttcaaaatatcatgttctctcctaaacctacacctacaaatcaagtattcttattgcattctagtcataatcgtgatatatttatactacatattttatcatgttaacagttcgtattatatagctattgacgcattcctatatttatataaagttcatgttattgtttataggttaaaatatgccataactctttgtgatcttcacaaaaaaagagttatggcatattttaacctataaacaataacatgaactttatataaatataggaatgcgtcaatagctatataatacgaactgttaacatgataaaatatgtagtataaatatatcacgattatgactagaatgcaataagaatacttgatttgtaggtgtaggtttaggagagaacatgatattttgaaccctaaaaccaatcttaggggagggcaattgttttcattccatggttatatgttaggcaaatag

SEQ ID NO: 13498 - DNA, 653 bp, Gossypium hirsutum
caatgtcccttcctacaacacaaaggaaaaccctccccgatgcttgggactacaagggccatccctccgagcggtcaaaatccggtggctggaccagcgccgccatgattctaggtgttgaagcatgtgagagattaacaacattaggtatcgctgttaacttggtgacatacttgacggaaaccatgcatttaggcaatgctacatcagccaacatcgttaccaattttttcggcacatctttcatgctttgtctactcggtggtttcgtcgccgacaccttcctcggcaggtctcgtcgatatacttcgattttctagtgtactgttcccatgcgcacacacacttcttagttctgtttataacatttgatctttaaatccacagatatctcactatcggaatcttcaccgccgttcaagcaacagtaagataatattaatttcctttttgacttaaaatcatcatcttcactttacaattgaaaatcatttgcataatcgtttgcagggtgtcacaatcttaacagtttccacaataatcccaagcctaaggccacccaaatgcaccagggacagcaccacagtatgcatcccagcaagtggcatacagctcactgttctctacttagccctttacatcatagctcttgg

SEQ ID NO: 13499 - DNA, 676 bp, Gossypium hirsutum
gcagtgcacctacacgtacatacaatcacacaaattctcactcttgagtttgtttgggccctcaaattgaaatgacttgtataaataattttcattgacaagtagttgtcatgatgaatggacaagggagattttttgaggttagctctgcgcattggtagaataaacttaaaatttagcaatagagattatttgaggttacttctgaatgttggtaaacttaaaattttggtagcaaaataacactttcattgtctgtcaatatgaaggaatctcctcaagctgctagagttaaagtactggcaagtggaaatgcaacagaaagaagattcaggttcgctgtagtctgatctatctttttttggttttatctgtttcgctttgcagtttctattcttttctagtctcaagaagttctgttttatttttttagccatcatcaatagtctttgttggagggttcattgtttcatttgtttgaactcactcccatgtggttaactaatgattgtggcttattccatagcatactttgaaagtctgaattgcatgatacaggttatatgtcccccatgttagaaatttagaatcttggggacttctaccttaatggtcattttgttctccttaataatgctagaaccagtatatactctcacatgtatgttgtcgtcag

SEQ ID NO: 13500 - DNA, 615 bp, Gossypium hirsutum
ccaacaggttgaatcacgttttcctttgtgttactaatttatcttcggttaaaatatgtcctacttttcgaaaattaaaaatttagtatttattttttgaaaattaatactgttaatttttttaaaattcaagttagttacaataatttttttaattgcataattagtaagtaaaacctgaatttcacagaaagaataacttcaaaaattacaaagtagagccactaaattttagatataaataaaagtatataaactaaatttttaattttcgaaaggcacagagactacagacacattttagccttttatctttttacttcagtaaatcatctttgtcaatcgaaagataaacaaaaacgggttgtcttcaagtatgttacgtcggcgagcgatagaggtcggagaagatgacaagcgatcgaacacgaggagaaacaacggtccaaataagtaaagaattgcaggcgatgcacaaccgatgaaacaaaccagtatggcaagccacaatgtcttggacaacactacgaacagtcctgtaacgaatgccaatgacatcgccacaagtgcaatccaagtaaaagcaatggcgaaaggaagtgtgtccatgaatga

SEQ ID NO: 13501 - DNA, 540 bp, Gossypium hirsutum
ctgtcaagacctataatccaaagtctttaatataaataaataccttctctctcattattatccatccacgcctctctttccttgggtgtatttttacgatgaccgccatcaccatagaaactctcaaagagcagcagcagattatccaacaacaaagcgagtcagccgcggaatcaactcagccgttgcccagtctggatgaagtggagcaaattctgggctatgagtttaacaacaaacggttattagaagaagctttcacgcatgcttctttaggactgggtttctccaatgagcggttagagtacgtgggagattctgtccttaatttactcttcaccaaacagcagttttttgaataccctgatttgccaccgggggctttgactaggctacgagccgccaatgtcgataccgaaaagttggctcgtgccgccgtcaaacatggtttgcatcgctatttgcgccataagaaacctcttctcaaagaacaagtaagcaatcgaaactcttttttgaataaaattaattttagataga

SEQ ID NO: 13502 - DNA, 494 bp, Gossypium hirsutum
  misc_feature (155)..(155): n is a, c, g, or t
  misc_feature (424)..(424): n is a, c, g, or t
  misc_feature (467)..(467): n is a, c, g, or t
  misc_feature (469)..(472): n is a, c, g, or t
  misc_feature (475)..(484): n is a, c, g, or t
  misc_feature (486)..(486): n is a, c, g, or t
acatttgcacatcttgaggaaatagtggtaaaagtggcccagttattccactcgaaagaaagcacgtttctcttcccaggtagacatagatggattacttttactttcaatttgttattaccatgctgtgtttatgacttcgaaattctgctgtnttggatgcttcttgtgctgtattgcatgcttcatatattatatagataattggtatgtataactgatactaaagcatggttccttctctttatatgtaagttatgtgtgaaaatcagtttagtttgataaaacctctccttgtcactgcaagggctttttggcaaatatatatatgcacacccattgtgtttagggcaagagcatgctgtaaattaacaaataaaatttctaccaagagaaaaaaatcaaatagaaaacagtaaaatcntctaaaaaactcaaaataaataaaatggagaattgtatataanannnntcnnnnnnnnnnangcatcatt

SEQ ID NO: 13503 - DNA, 616 bp, Gossypium hirsutum
ctctatgagatgttgggatggttccaaacgtttcagcataaactgtttgtatagttgtttggtaatttctatatatataaagttttgatgtttcatcataatctttattatttattggtttgtttgttctttctttttgatgtttcttcagagttttctctctctctctctctctctctctctctctcacacacacacacatatatatagggttgttggtcaaattgcttcaaaaagtgcttaaatggagtgatacttttatcctcacatgtttcttaccactcttatcttggcgtttccttttcgaaattatatttttcgatcaaccgaaaaagaaatcaatattttcatcccaaaagaaagaacggtactttataattgaatgcaatataggaaaaagaaacaaaatcacgttatttgttataataactaaagatttagaaaaaggaaaagttggaaattacataaaatcttttaatacacatggatgaatatatttaactaatgataactaatgacaatccaaacaagttcaaacacagtttttaaaaaaacaaataaaacaaaacagcctagcaaatactactaagcggacaaaaacatttcaacaacaggc

SEQ ID NO: 13504 - DNA, 670 bp, Gossypium hirsutum
acggtttcatcgggatcgtcgaagatttgcccgagttagctgaattttcattggcggatgtccaaaccgcaacatgcaatttctccgagagcttcaaaatcggaaagggaggacacggttgtgtttacaagggggaaatgctgggtcgaactgtggctataaagaagctgtatccgcacaacatgcaagggcaatctgagtttcaacaggaggtttcattgttttccttctctatcagaacccgaaattatcgaaatttgtgcgcctttgagaataccctttactagttttactgctcgaaaaaaactgaattctttttatatgttttcttgtttacatttgtggtgcaggctcaagttctcagcaagttacaacatcctcatttggtgactttgctcggtgtatgccccgaagcctggtccctggtttatgagtatgtgcccaatggaagtctccaagaccggcttttccggaaaacaagtgtttctcccttgacttggaagatacgagcacggatagtagccgaaatctctagtgctctttgctttttgcactctgccaaaccggaaaagatagtccatggtgatttgaaacccgaaaacattcttcttgattcagaactaagttgcaagatttgcgatttcggtatctcaaggttggtcacagagga

SEQ ID NO: 13505 - DNA, 457 bp, Gossypium hirsutum
ttatttattgggtcgagttcgggtttcccttagctcgaaaatagattaaaattttactaaactcaacctaaattatagatgttaaacttgtaccctattccgaccgtatgaaatttttatttattttatttttatataaaaatataatataaaaaatattaaaataaatatttttaataaataataacaaaatagtaacaaaattaatgacagtaaaataatataacttaacaaataaatacatctgaaatagtaatcatattaatgatagcaaaatggtgaaaaaacagctacaagacaacaatttttttttttaattttgggttgggtccatgcaaaaaactttacttgggacttgatctgttttctgaacgagtcttatttttttacctaagcttatatctttttcaaaattctctcacttttcgggcaatccttcgagtcaaaatgtgacaaa

SEQ ID NO: 13506 - DNA, 485 bp, Gossypium hirsutum
ttttggatacatacccatatcccacactgacacccagagtcggaataacatagttctgcattgcattgcagaaaatttgttttcacatttgatgggctaaagcattagttgcaaccatggcttcgtgtattcatttagaatgtatgatacttaaagattatttttcttgatgtgacaactaggcgcctcttttcagtgcatgttttatccatttattcaaaatttcaatagggccatattttatttgtgatgttttctcttacatttttaattctgttttatcttaacctcgtgatttttgcatgtgagcttataaattatcctctcacatgtccatattgcaacagcaagtcgcatggccacttgtcgtttactgcttgcttttgttgattgatttttgtccaatcgaaatttagtgaatggcttgtgttctgatgatgttaattgaaactgtgtgatatagatgggtattgaaaggaagtgaa

SEQ ID NO: 13507 - DNA, 452 bp, Gossypium hirsutum
caacaaatcccttgcagtatcacatatggtgctgatggttgaccaaagaatcatatggcttacatttataatcattggaatcaagacagtagaaataatagcacaaagtactacaatcaaagcaataattggacaaatacagtttttagttacttgtaaaccaaataaggaataacccaaaaatagtacctcatagcacgatagagggagcgataccacattacgtagccaccagggaccccagatatgaaatatataatggcaagaaaccaaactgttggacctagaataaaatataaacttacactatgataaagatgtcaaaatagaaattaaccacttgagggattaagcacaatactaactttgaaaacccaccttctcctttgatccaggctatagtaacaactaccacattccaagtgagacaaagaaccaaaccttccatccaa

SEQ ID NO: 13508 - DNA, 574 bp, Gossypium hirsutum
tgactctatgtgaaggataccaacacttctacaaagtttgatgtgaatattttgctctgttgaacttctttttttacagtttgataattgcttccttttgcttcgatatttcaagcccgtggaactctgagtaaaaatttcatgctgaaaccaatgtccggatatctgggctttagccaaagttcaacaatcattttagaggtggttggattggttactagttaccaccttaatgttttatgtgaggaatggtctgacaattgtaggtcaatgagacaccaaaatttctattcatatttaggcatttggcatgcgcaagtcaaaattctctatctgagcttcaaatgcaaccgtctaatataagtaacaaatctatgttactaaaatttgggcgttagtgtattgatatatgttagagacggatgtgtttagtttctgtttttctaagatttatatgtatttggagggtcacgtcaattccagatatgtaatgacggtgagtgaaaaaatgatattcagtaagtgtaagcctgaagtttgaaaatcagtagtatatacacaagaaacggacgca

SEQ ID NO: 13509 - DNA, 512 bp, Gossypium hirsutum
  misc_feature (45)..(46): n is a, c, g, or t
  misc_feature (50)..(50): n is a, c, g, or t
ggggatacagggtcatgcacctcaaactcctcgtcttcattgccnncctnttcaattatcgatgacatccgatggttaaggagcagaccagacgcccagtccccattaggatcacaacccacaccttcctcaagaatcttgcttgctgccctaaacctttcttcaacactaggcaatccacgcagcaaattctccgcaagaaactccgaagtaccattgcaactctcaaagaaaggatgtttcaaaagctcatctgcagagggtcggattgcaggatctttacggagacaagaagcaaccatgtcttgaaaagtttctgaaaacttcttggtggagacaagagcagttataccgaaagaccatatatcagctttgaaactataatctttatgtgaatgaatcacctctggggccatccaatattgcgaaaaagacgaagaacataatctgcagaccgaactccactaatagaacaatgacgaaacaccgaagtccgcaagcttatcacgacg

SEQ ID NO: 13510 - DNA, 483 bp, Gossypium hirsutum
ctcgaatgcaggaatcaataataacacttcgatcaggttcctgaaaggtaaatcaaggttcagtttttaggcttattaaaattgttaagcgtcaaaagcacagtctacaactaagaaatataaacaatagaaaaattaacttaaaaatgaatatgagcccagatacagtcttagcatcgtcatttattaattcatcgatatatacaaaacactttcgcacagctaaagatgaactgcaacagcaacaaacaaatgcactagatagctcgaccattgggtattcttccaagacacttcagattaaagcgaagatgtgccacattgtataattatgcttaaagtgtatctaacgatttgcttggcttatgattatcatcgaatcaacttagctttctctaaaagctaaagatttaacagcacaaagactgtgcgacgtatgaatgataaagtaaaatattcctgaccaaaagctgacgttacaat

SEQ ID NO: 13511 - DNA, 641 bp, Gossypium hirsutum
gatgtgtatagtccctggaagaaaataatgtataacatgaagtatagcccaaaagtatcaaaatgacatccattaaaattaagaatataaacttgcaacttacagaaggcatagagataatgtatttgtttacaaaacgcaacgaaagctttctcaaattagcatggggcgaatgaaaaaactgctcatagggaaagaagaagaagaagaaaaacataattagcaaatttacatatgcatgaaggaattttaacacaagaaaatgcatttcacctcaaacaattcaagaaggaatatgttgatgggcctttgacctgaccaagcgtcatcagaatccaacaattcgggtgtattctcagagatctgttttacaaaggaatggttgatgcgttaaatgtaactaaattagtacaaagttaacatctatgatttatggttgatttctattcaatgatggtagaaattagaaaattactcatttcatacctttgacaatgcatccatagcacctccatttctatttggatcaccactattaaggaaatgtagaagagtatgaaacagctcaggccatcccaaaattcccccttgttgaataacatttgatatagtcgtcccacaagttgacctaatgtgttgat

SEQ ID NO: 13512 - DNA, 413 bp, Gossypium hirsutum
aaaagtaaataaattataataaaaaatatagaataagtaaattttacgtgaaaaaactccttaaaagaagaagaaaaatcacgggcaaaatgagatttcattataataaataagaatataaagatggggagaattaaaggaaaacctaaagccccaaaagaataaactcttcgaaaacaaagaatacaattctctcaatctaaatatttctgttgtataaaatatagagtaactatggcctatttataggctgaaatttatagcaaatatgattatagaagaaaatcgaaaacacttgagttgcacatcgccacgtaatgacgtggcaaagcgttgtcagggcaaaaaacatttctttattacgatatcacacactgtttgtttgaaaatccgagacataactctacaagact

SEQ ID NO: 13513 - DNA, 545 bp, Gossypium hirsutum
tatagcaaaaaatcaagcacgctatgaaaaacaactaaagccttagaacatcgagaaaccgtatggctcattttgttttgtaataagtttctatttacaactacattttatttatgatcaaagagatgaaataaataaaaatgtttggaaacccccattctcgaatttttttaaaataaatggataactactttaaattgtcttttagcccttttcttcaagttttcatatttggttatttgccttgttttatttattacagttcaacttccagaaactatggcagattagccgtacggagactgataatccttatttccatttgatttggtaaaggaaaaggaaaaagagggttgcgtgtgggctgaaggctgaagaaaaaggaaatgggtgacattcttaataatggcattgtatttaaggcataatctatgttagttggactcgggtgtgagtgtcaatacaagtatatgttcaacacgggtatgttttttttcttttgaagttatttcatgtaattggagggtcaatccccagacccatgt

SEQ ID NO: 13514 - DNA, 690 bp, Gossypium hirsutum
cgcttgatctgcttcttcatacttcatccgcataagtctgctccttggttgctttatctgcatggaggccaacttcaacaatttctttcatgatctgctgtcttcttttttggtgttgtgtgaaacaactaaaagttcaccattatcaccaatttgttcaaagtctagtggttgcttcatatacacctcttcaacatctttatttaagaagagtgttagtaataaatgtagaatgtacaaaatgttagtcacatgatagagatgaatttttggctttactgtacctattttgcctcttgtaatcatggaatgtgcatatgtaatatggacaagtaactgaggagaagaagtaatatgatcatctgaaactggatctggacttcctgctatagaaaatatgttgtcatcatgttgagcatgagctaaattagtgtgagacaaagatagatctaaagcgtgtgatgcaacagaagatggggatgcacaagaatgagtaagagaatgaacagtaggtggatgatctaaaaaggtttccacaaaagatttcaaaaggacgaattccatgtaatgcttttgtaggcaagatattaattaattaagcagcaacaagaaaagcatgataccagtgtgtcaaggacatagaagcctgggcaagtcgaccttttcattagctccgttccctcatgtaag

SEQ ID NO: 13515 - DNA, 524 bp, Gossypium hirsutum
  misc_feature (58)..(62): n is a, c, g, or t
gattgttgtttgtcagaggtcgtgggtttgagtgcgttgaagttcattattctttgannnnnttaattatatgtaacatatcatcgtaaaattgtgttaattcataaaactcgtgcccaatatgggcctacagaatacggatgagcaaattagtctatgtatgttaaatcaaagaacaaattgattcttctattaaaaatttcatccatttctacagataaaaataagttcaatcaacactaattaagagagctcaagcataagtgagcacgagaaacaaactaatttttttctaggcaaacaagtttaattgaccctaataaatcaaggtcaagcatgtatcttaatttgcatatcgaatcaagctcaaacttttttattgaacacgagtcgaaatttgaggttcaaattttaattcgaacttgagcttgaactttttttttttaatttaacttaaattttgattccgttaatttacttcaatataaatttattattttcaactcaaatagggaaaactaata

SEQ ID NO: 13516 - DNA, 671 bp, Gossypium hirsutum
tttgagtttctgacggtaaggcaaaatttattcttaattgaatttgatcttgaagaggatctggagccaataatggagggtagaccatggcttttccgtaagaatcttattttgtttgataggctatctcaaccagtagaaagaactcaaattcgacttatttcttctccattctggctgaaaatagggacgtgtttaccagagtatgacaaaaaagatctactacatgcaattggagtcacatttggaggtttaataagatctaagatcaatggtaaggtgtgccgtctcaggattaatttaaatgtacagaaaccgcttcgacgaggtatttttgtctcaattaataatatgtctaagtcatggatcttttttaagtacgaaaatttaccaatgttttgctttaagtgtggacgaatggggcatagctttaaaaaatactcggtgttaaatccagtagagataagtaaaataagtgatgatcctccatacatactagctttgaaagcagaatctaatctaattcaatcaagaaagagtgtgtgaaatttagagcgtattcaagaaaagcaagggttcaatgctcgtatataggaaaggaagcaccggttatagagaagggcagaatgcacaaagaatgactgaatatgaatgggatacagctaacgaag

SEQ ID NO: 13517 - DNA, 620 bp, Gossypium hirsutum
  misc_feature (50)..(53): n is a, c, g, or t
tgaaatttgttaactgaaaccgaatcacattagccctgtgattcattgtnnnnttttctatgagatgctaagatggataggaatataactaaatttaatgctatcaatatatcaaaactttctaatctcttaacatgatatatatttcatccacaggaccccaataacagtttacatgagggataagaatactgttaccctcaaaattatatccgagtatggtcaagagtatggtaaggaaaaccccatcaaagttctgtatcatggttatggacactatgaagtattgatgagtccagaaaacagtgcctcttgtaaaccgtaagatatcttgcttcacttgttttatgttcattgcaagtgacatgacatgtaactgacaacatcattactgatttttacccttcacgtaatacctatgttaatcgagggtatttttttgagactgcttgaaaaggtcatatactcttttttttttggttaaaaaaaaaagggcaaaaaccccgaagaagaagcccccttcctttggaaaaataaattgccccccttttggcctaaaagggtgaattggatgccacgggtaaaaaaattccttttagggccggccgggtttcaaaatt

SEQ ID NO: 13518 - DNA, 442 bp, Gossypium hirsutum
acgcgttttccctgcaagatgatccttaaaaaaaaattataacccatctctatagatgaaataatatctattttaaatttatgatccggggtgaaattagatgcggtatgcaagggttttacctctaaaaaaaatataaaaatttgtcttttaattctataaatataaatttttaagttaatttattggtaaaattgtatttcaatccatctcaaaatttaaaattcaattataccctctcaaaaaagaagaagagtttaatccctttaaaaatataaacttttacactaatataatgttgcaattatgtttttagctcacttcaaaatttataattgaattttgactcttctaaaaaaaattttaatttcaaatttaattattttagcgatgactaaagttaatcaatagcatcattaccaaccaaagaatcaagccataa

SEQ ID NO: 13519 - DNA, 685 bp, Gossypium hirsutum
attagctgcgagttaaagagtaagatgtaccaaaaactgcattcagaactaagatgtaccaaaaactgcattcagaactagatatggtatgaatttaaggtgatgccatttggtttgactaatgcccttgcggcattcatggacttgatgaatcaggtgtttcagccatatttagatcagtttgttgtggtattcatttatgacattctaatctattcaccgaatgagtcaggtcataccgaatatttaagagttgtgatgcaaaccttgcgtgaaaaacaactatatgtgaaattcagtaaatatgaattctagctacgagaagttgattttctgggacatgttatatctgctgatggaatcagggttgatccgaataaagtatctgtgattgttgattggaaaatcccaaagaatgtttctaacgttcgaagtttcttaggattagccagatactatcggcgattcgttaaaaacttctcaatcattgcttcacctatgactaggttattacagaaaaacattgaatttgtttggtctgataagtgtcaacagagttttgatcagcagaaaaacatgttaatagaagctctaatgttaactcagcctaaatctggaatggcatatgttgtttacagtgacacgtctctcagtggtttaggtttcgtgttaatgcaatcagaga

SEQ ID NO: 13520 - DNA, 666 bp, Gossypium hirsutum
gcctgcgatgatgcaaaccactttcttttattgcaaacctcttggattccagaggcttttcatgcattgcttgtactgaatcatcataaagtgccatcttttccatgttcagtttctcttgagcaagtttatgtgtaaaaatgcttccaacatcaactaactttgaacattccctaagcctggccacttgccatgcctcaaattctttcttaaacttttgcaattcttcctcctgaggatgttcacgaggcctaggctttccatacctatggtcggtgttccatctctcagcatctctaactcttttaccgtaaatagagtcaacttccctttgctttgagtaattcaagttagatcccttgacacatttctcccttccagaaaacttgactcgctggtcatcactctttttcacaaccggttgaactacagattttgtatctactggcaacggatctatccccatcaatttggcaacaatactgggtgcattctgtccggtgttagattgtttggacatctcctcacatatcaatttcttcattgaagcctcagtttgataaaagtttcttgctgcccagtcttcttccacttgataagagccctgagattccgtataaatgttagaaagtgaactccttgacaatccactcttaagacaaccca

SEQ ID NO: 13521 - DNA, 651 bp, Gossypium hirsutum
attggcatacttaatccaagcaggcattctgtctacccaaactccatcaccatgcttgaatcggaacttgactcttgaattatgaggaatagcaggatttccctcagaatccggaattttaatactccaaacgccaaattcatttttttccatcttgtggttggaaccatcccatccgttaaagtctccaacaacttgagcttcccttcatgaaggaaaagactctagctaagaaatcaaatactatgagtaaaattgtgtttcagaaaccaaaacttactgagcaggaggagcccactcacggtagacaattccatcctcttctctgttaaatccaaatctcaaataacctacagaagagagtaaaagacagatttcgtttgaacattcacatataaaatattgaatttactacctagcatgcaatttcatcattgaagtagcctttgagaaaagcaaattaagaagcagatagcattggaatgaccttttgcaaattcctccaagcctccctcataattttcaaagagatttttctgatccacatatttcttaattctatattgaaagtgatctttaaactgtcggagggcagaatcaatatccaagataccgatattttgcatgtcttcctcggaagttggaaacagt

SEQ ID NO: 13522 - DNA, 507 bp, Gossypium hirsutum
  misc_feature (57)..(57): n is a, c, g, or t
  misc_feature (495)..(495): n is a, c, g, or t
gcttaaatggttaatccttctatcactcacttaaactttaaaattagaatacaaacnaatttcaacttcgtctttgatcaaatgaaagaactgatcacttaattttcactctttgttaatatatgaaattattattttaatagagaaatatgtgaaccatttacagcccacaaggcatatagttattgccactgcatatcccattttaaagtaccacactgctaaccccattattttcatctttgtacttgatttaaaggtcagcatcaatgatttgtttttttttttacagaattttttataaaaaaatatattttttgccatttattttttttatcttgaaaaaaaaaaaaaacaagggaagaagtaaaaaaatttgaccaaacccctgggtttttcctttttacttttggaaaatttgaaaaaaaaaccccccattttttgggggttttggaaattgccccctatttttttttttttcgaaaaccgcccctnaaggaaaggaaa

SEQ ID NO: 13523 - DNA, 660 bp, Gossypium hirsutum
catttgacagaagagcctgtgagttacggatttgagcacttagttcccaagcaaattggagattgttgctttcttttgctatcacaacaaacgcctttgcaagagaaatttgatcggtaagttgtctggtgacagagttggagctcaacatttcatcagtgatggttacgccttccataattctgtcacgccgataaggtttctgcaaatatgcaacacaaacacataatttgagaatttaacatagataaaagttttactcataataagccagataactatgaatggaagtagtagtgccactagagaacagaagcatcctaacaatcttatctagtcttaagatttgagacaataaatgtccgttcagaatgttagacaaagtactccaaccattccgtggtttaaaaaccattttcttaatttcttctggtaagttttaagtatcaacacaacatgtgcagaaaagaaaagaacagataccattaaacaagtagagcttatattactaggtggcgacaacaagaagaagagagagaacaaacaaatgattttgatgttttccactaaaaaatcaaaggaattaccaaatgcaatgcaaagctgatatcccttgaaacatcggtttacaacagtagacaaaagtgcaagagcaccttg

SEQ ID NO: 13524 - DNA, 927 bp, Gossypium hirsutum
  misc_feature (161)..(161): n is a, c, g, or t
  misc_feature (167)..(167): n is a, c, g, or t
  misc_feature (174)..(177): n is a, c, g, or t
  misc_feature (659)..(665): n is a, c, g, or t
  misc_feature (670)..(674): n is a, c, g, or t
  misc_feature (833)..(835): n is a, c, g, or t
  misc_feature (841)..(845): n is a, c, g, or t
  misc_feature (847)..(848): n is a, c, g, or t
  misc_feature (850)..(854): n is a, c, g, or t
  misc_feature (857)..(857): n is a, c, g, or t
  misc_feature (861)..(869): n is a, c, g, or t
  misc_feature (871)..(871): n is a, c, g, or t
  misc_feature (877)..(877): n is a, c, g, or t
  misc_feature (879)..(886): n is a, c, g, or t
  misc_feature (888)..(905): n is a, c, g, or t
  misc_feature (908)..(913): n is a, c, g, or t
  misc_feature (916)..(921): n is a, c, g, or t
gaatgtgatatctatctttctctttttgttcccctttttagctttccagatttacataatcatcacattggacccgccagcagatccaaacattcatttgaaattcaaaccagatttgaaaaacaagaagttttacattgaacaaactttcccaaaagaantggtantgttgannnnggaaacggtcatgtttctgttccaacccatgatttgcaggtatttgaacttaattaattagtgcaaggatttaacatcttgctttattggtttttacttgttccagtaattgctttatcggtttttcactgtccataattttgcttaatctgtttcttgtcctatcctccattatgatcgattggttttcacttttgcttctatttccacatactgatgaatgtcagcatgtgcatatgtacatcataaaaaggtaaattctttgattttcttcttattggcagaaccttttcataaaacatttgcgtattttgggaatggactggttgtttttatctgccatcaagatttataaatgatgttctgggggcaaagggctgcaaatgctcttggcatgtttaggttgagatggggtggtgaatcctctttgacaacaggcttactaggtgatgtgcctcatgagattgagttgtctgactatnnnnnnnatacnnnnncaccattggatatgctactcaatacagagcccaagttattgatcccatcagaggagcttcttgggttttcagaaacaggggatctcatagactcacttcttggttgtttgcttagtgaagccttaacagagcggaggatgcattttgtacgtcctgatnnncccttnnnnncnnannnnnttntccnnnnnnnnntngcaatncnnnnnnnntnnnnnnnnnnnnnnnnnnagnnnnnnttnnnnnnaatttc

SEQ ID NO: 13525 - DNA, 519 bp, Gossypium hirsutum
aggaacccgaatgattctactcaattcaaataatcaatttctctcctctttgacccagttcagcacgtctcctctctcttctcttcaattccaactcagaaccaaaagttcatcaggtacgctcgaattttcagctatttttaaaatttttccttagttaaatccttgtttggttagtgagatagagacagaaagaaacgggttttcttttaaataacgtaattttaaaaaaaaaatcctgccaattattagctaaacggagaaatggaaaatttgtatgaagtttttttgttgaattcatgattgttaaattacatagggatgtttggagattgttattttccttgccacagcattcgattcatacgatgatgtcaaagacatgttattctatgaaagctggaaccacttccaatggaaatcttattggggctttgcttttttccatagttttagttctatgttgttcggattctacattttttctctatctgggtatggagatatgaccctcgaaaa

SEQ ID NO: 13526 - DNA, 614 bp, Gossypium hirsutum
ctcgcacgagaggactgtaatattctttcaattttggctagatgaatggcgaatagcctttcattattggccattgcattccctttatcatcatcactagtgggaagcatttttgtagtctctttggaaagcgtgattccagcaaaattacccttaaatgaaggaacttgtttcttctcaatggtactcaagagctttctagcttcaaaacattttggatggaagatcaaagcgacaacaaggataagcaaaacaaggcttaaacgagccatttaagaatatattgtctctgcctgttgttgaagaagtgaggccttgtatgacaaattagtgtattctgaggtatatatatataagtactgagggacccctgttagctaactcaacacgtttgcaatgaatcaaaggatatttgggtaattttctgcatggttaggtacaaattaactagtctgtaagcaagtttacatgtgctttaagtaacttcctgcaatttccatacacttgtcaccaccaatatttgggggttaactggatttttcccctctgaccacgaccttttatactttgtgattcatccttttaaccgtcaaatcgaacaccatttccttcac

SEQ ID NO: 13527 - DNA, 512 bp, Gossypium hirsutum
tcgtcatagtccattgcctctaaatgatttgggtggaagagaaatagtccgtaaaggtggtgagcttgtcgagctgcgtaataacaacactagagtgttgtcaacgaatgctaggcctgaaaatctctatgccggaagttcagcggattttgaaaccagtatcatgaagggtaagagacatgcttttgctgggatggctcctcaaagtgttgcagaaaatcacaacggaactgaaggaatttggttggaagtgctccaaaagattcaagatgatagtctgaaagagtttttatatcgagaaggaaagttgatctctgtcaatcttggagcaggtaaactccttgtaagctttacgctcatttttcatgtattgatcataaagccgtaacatacttttagtaccgatactactatgaccgagaaattttagcaacttggggccataatgattcagtcattgatggtcaatggctttatggaatttaatgttcttggtcaaggcagaataagat

SEQ ID NO: 13528 - DNA, 478 bp, Gossypium hirsutum
  misc_feature (473)..(473): n is a, c, g, or t
tttggagtgaccgtattataaaataaacgagactcgtgctgataacgtgttataaaataaaaagacagaaagtaaagaacaaaaaaaaataggagagtaaagagagagcgcattttattgatcaatcggaatcatatgcaatgcttctccaaagtgtatatttataatcataagaagtataaatgaaatatgactctacttctaattactattaaaattttaagtacaccaaaacttattttaatcttgatggatacctacttaataataaaatattcataacaagcttatcgtttttttttcatcacattgtcattcttgtatttaagattgttgaaactagatcaaatcgattgattgaaccgggaattaattgacatacgggcccaaagtaaagaaataatcacttaactaaactaactgtcaatcttttaatttttttatcaaataagtcacatttaaatggaaaagtngacgg

SEQ ID NO: 13529 - DNA, 597 bp, Gossypium hirsutum
agacgaacttgaatcactatgtccagccataatgtattcttgctctggtctacaactttctggaaacaaaaacatagataaaacaattaaccatgaatttgatataaaccaccaataatcttgattccataatgttaaataaacaaataaaaaaagcacagcccatatattgcaaggcaagggtgaaaccaaaattttatgttagttaaaaaaattggtttaactatgccacaaaccctcgtactatagttaagtttgagatttagtctctctgcttaaaaccttaaaaattaaagcctcctacttgtttgattttaaaatgttggtccaatcattgacagcatcattaatttcctttaaaaattgctgatacggcgcattgattaacagaaaaacatatgtcgtgatatatgttggtatgatgtagtatacattaatccacatgccacgtttgcaatttgttaagcaaattagtaatgttgttaatgattcgactaacattttagcattttaagtataggttctagatttcaaacataactagagaacaggaacttgtgtcatatttagaccaaaaattgaaggatcaaggagatt

SEQ ID NO: 13530 - DNA, 513 bp, Gossypium hirsutum
  misc_feature (6)..(6): n is a, c, g, or t
  misc_feature (507)..(507): n is a, c, g, or t
cttttnggagtccctctcattgacaacgaacggtttgcgccccgaaaacattaatattcggcgagaattgaaatgctggctgtgcctccactgattagcttttttagttgatttagacatatttgataatcatcattaatcttccttaccttagcttacctagaatttgatagctgatctaatttgcagtacaaggcttgacagaaatggtgaacttcatccaagttaattcactttccatactttctcactgatattttcgaaaaacagtttcattttctatttttttaaaaattaataaaaaaaaacatttttctataatagaaacctcagaaataaaataaattatggatttttttcctcaacatttatattctatgtctgattaaaggaatgctaatgcccgattgatctggaagtctagaacatttaatgtatcttccattacttagagattttgagttggctgggacttatagttggggttctgcgtgtatagagaactcngtcgag

SEQ ID NO: 13531 - DNA, 564 bp, Gossypium hirsutum
  misc_feature (37)..(37): n is a, c, g, or t
  misc_feature (40)..(40): n is a, c, g, or t
  misc_feature (538)..(538): n is a, c, g, or t
  misc_feature (542)..(544): n is a, c, g, or t
  misc_feature (546)..(547): n is a, c, g, or t
  misc_feature (549)..(550): n is a, c, g, or t
gaatttttgagtaagcttcctaatataaatttttcangancttttcataaattcttataagcttctaacaactacaattacaaatactataaactatttacttaaattcctaataaaaacataaatttctaaccaaatactcaaaggtatattggaaacctaattttgtaaaaattcttaaaatattgtaaaattttttaattaaaaattataaaaattataaaattattttttggcattataaattttacaatttttgattaataattttttacattttaaatttttttttacaaagttgggtatccaatgagactttgaatatttggttataaaattgcatttttcattagaaatttgagtaaatagtttagttttgagtacaaaatctattgaatggtttgaattttgccattcctataatcacttatcaccatgtgttaaatagttaaaatatatgtatttcacatggcagtgaaaagattgtaaaatcaaattctaaattggagttgttgctttgtttttttttttaattcgngttnnnannannttcccttcaatttt

SEQ ID NO: 13532 - DNA, 663 bp, Gossypium hirsutum
  misc_feature (205)..(205): n is a, c, g, or t
  misc_feature (232)..(232): n is a, c, g, or t
tagtgttacgaactcctttatttccaaaatacccactagtagctttaaatcttcattcaatccttcttcaaatcttttgcacatagcaacctcatcagctacacactcccgggcatacctactgagtcttacgaattcatgttcgtattcagatacagtcatacggccttgcttgagttccaagaactccttacgtttttgatcnatgaaccgttgactaataaatttcttncgaaattccgtttgaaagaaatcccaagttactcgctcgttcgggactatggaaatcaaggtcctccaccaatagtaggctgagtctcgcaacaaagatacagcacattttagacattcatcgggtgtgcatgacaattcatcaaacacccgaatggtgttatcaagccagaactcggccctttcggcatcatcagtaactatggccttgaactcctcggccccacgcttcctaatcaagtctacaggtggcttactcagcctcacaggatcagcgactgatggccttacaggctcttggggtggattattcaaatttgggaattgttggacagccggattggttcgggcatattgcgcgacccactcattcatcatggtaaagaaggcttgtttagccccctcaccttgattattcgcagatgactgagg

SEQ ID NO: 13533 - DNA, 471 bp, Gossypium hirsutum
  misc_feature (49)..(58): n is a, c, g, or t
atagaaaatctatttcctttgattccaattccttgctaagctgattttnnnnnnnnnncacttgctctacaaacacacaattaaaatattaatataacaataaaagacattcatcagcaatgtcatatcatccttttaatatacaagatttcaatctacatttgttgtttttactatctgttgttaatatcacacctatttcaaatttggtatagttggaatatataacacaatggaatattcaacacaaacagctacaaacgaggattttatcattcacagacgttaactacttccaattttgaattattttaaacattaataactaaactctttttagtgatctgtttatatagattttcagccttttatttttgaagaaaaataaaaaagagtatccaaacggaatcacagctaataatcaccaaaatttaaaaagaacctgaagttaaagcaaaatttaagaagaat

SEQ ID NO: 13534 - DNA, 400 bp, Gossypium hirsutum
tctcttctctcttttcctgtttgatgatttctatgtattagttgtagaaagatttgaatggagtgccttggcttttataggatgggaaaagggatttgagtttttgagataaagggcatgtcttgggatccataaaaggctagttaccatgtgcttgtcttacatgaaaacagaattaagcaaatacttggccaactttagttgatttggcattgcttttttcgaataattaaatggaaaagttgtggaattttgtatttattctttgtttataagtttggggtttctagttaaacgattttaagctatttaattaggtagttcaatcatgtgacatcctaaaatggtttgtcactaataatttaaaggtatatgtatcattcttcaatttgattaaatt

SEQ ID NO: 13535 - DNA, 628 bp, Gossypium hirsutum
  misc_feature (59)..(60): n is a, c, g, or t
  misc_feature (62)..(62): n is a, c, g, or t
aatcgtactaaaataataaaatattgttaatgaatgaggaagttgaatactaattattnntnggctgctgtgctgagcctaagataatttaattcgccgatttattcctcaaaaccggagactacactattttattacatctaatttaccttaactctacccccaaattttttatataaaataattaactttacgtatgttaaaaaaaaatattgacagaatttataataattgaaatgaagataaaatataattttcaaaggaatggggattatgttagcatagcaagtatttagtggtaacaacatcaccgttaaataataataataataataataataattttccttcaatgaattcattcagattgcagtatgtgaaagtgggggaacctttttttctgggcgactgagctacgctaatttccaagcaaagtggaaacaaaattatttaaccccagataacctaaaagaccgttacgttaagcatctattttaccatcaatatgctcacttttgtgttgttttaggcacatgacatgacttgtttttaatttatttcataaaatattattattcctaatctactctatgaggagaatgaacccaatttatcaatcatgggaacc

SEQ ID NO: 13536 - DNA, 506 bp, Gossypium hirsutum
acttgaaactgatagaagggtgttagggtttgatagtattcaatttacactatgttcggagaaaaaatatgaaggaaagagagaaggaagtttacgaaaggaaatgatgtatctgtaatttttttggataattaaaatttataaatgaagtaatttttgtaaattttggatgattagattgtgtaaagtagaaaaaataattgtttataataatttttcaaaataaaaaattatttttttatattttctaaaaaaactgtaaaaatggagtatttcaagaaaaataagaatattcaattcatttacttatttttgcttaaaaaaagttttgtttttggatgaattgtacttaagtttactcaattattagtaaatttatattttagttacacaacttcaaaaagttataagatggttactgaactattcaaaagttttcatttaagttaataaactattaaaatcattgttgtatggctttctttattcgctctacttgcgctaaa

SEQ ID NO: 13537 - DNA, 547 bp, Gossypium hirsutum
tcattacggaggtcgatactctaacaaattgagaagtttcttattgaacacctctgatgaattaacaaactaacgtactgcatcattcaacaaaaacagatgtaaatttattcagactcatgtatctgcattgtttgtcaaccaaaatcttcagtatcaccttacaaattcaccaattcacagaaaagatgcaaaggtgaccagacacaatctttttcattaaaatggagtaaaagattaaaagttctgttcccaagtagagatgcatttaatctttttgtttcccttgaatcgggtactcttagcctaagaccccaagttactcagactcaagtgtaagtgtctaatatggatatatatatccaacatgagtatgttcaattttatctaaatttttccatatatctagagggctgggaaaattatatccttatacccatatctagatatgtgccagacaagggtacctaaagaaaaatgaaagcccgatcaaaatagctctaagccatataagctctatgataattgtttacaaggccaaacattt

SEQ ID NO: 13538 - DNA, 641 bp, Gossypium hirsutum
gagaagggaatcacacttgtaccgacaatattggctgagacgttaagatccttgagcttgtgtcagaagacgggcgaggggcggttcattggatgagtgcaactattgatggtatggtttcatgggcacttttggaaggtggataaggtttcttatcgagtcttttctaaaggttattccccgttaaaagatgaggcagccatacaaaggagagaggatatttcagaggagaagtgaatgaaaattattcaaaacctcaaggaaggggatatagagtggagagtattttggatggttcccgatgagatcctgtatcgatgtgggaactttgattaggtaccgttgttatgaatttgggagctactgggcatactccattgcttgcattaaagcaatataaatcgaggcagtttgtacccgcgacttacaggtttgctcagtgtgaattctcctttaaaggtgatcactataaaaagaaggttcgaaaactgtctgacgcttagaagtaaactcgttggatgaagaagttggctatcggtgccatggtgacacccgaatacaacggatggtttaggaagagggtcaatgataatactcctaggccaagtttagaagatacccgaccaatagtggaacattac

SEQ ID NO: 13539 - DNA, 618 bp, Gossypium hirsutum
tagccttgtactcatattcctcgccccatcagtatgtagataaacaaagttacctaacaatgatagaatactttagatctataatttacttaatataaattttcaacaaaaaatattgaataagataaagtattaaaatattaatgattttattttattaaaaattaaataaattacttttttaaaattgaaatattcaaattataatatttatattttattcaaaattattcaaaataatataaaatattagattaataagattaaaattggaaaataaataattttttaaaaataaatatttatttttatcaaacaataaaattatattctgtaattatatttactaatttaccaaataattttttattataaatttatcacttataaaatttaatattaaaaattcaacacttaaattttcaatttattgaacataccttcatttttacgagatatgaacttatttgaaaattttaaattcaattctgaattaaattttaaaattcattttatggattaaattgtaataacatttttccatgtaatatactagtgtggtgtgtcttgtattattattattattgtcgtcgtcgtcgtcgttatgcattaggctgt

SEQ ID NO: 13540 - DNA, 639 bp, Gossypium hirsutum
gcagcttctcatgggttctctgcagcttctcatgggtgcatcaatgactatgactgttttcctacgcactcgaatggctgttgacatcatccatgcgaattattatttgggtgctttattttttactctcatgttaatcattgttgatgcatttccagaattgagcttaaccgtatcaagactcgaagttttccacaaacagcgggagttatgcttctatcctgcgtgggcttatgcaattcctgcagcaatcctaaaaatcccgctttcattcttagagtcatttttattgatctctctcacctattataccattggttacagccctgaggttggaaggtaagatctgcacatatggaaactttagttctatgtttttggggattaagttgaagtgtcagatgtatgttacttattatacatgagtggcttaattatcccttagacatgactattagtacttactagtatatgcatcaattcagaaggggtacattacaaaaaaatgaatactaatgcagatgaaaagataaagatcaatctgattttgtaatattggagacatacatgtttcaattcacataggatctataaaccttactgccatggaactctaaaattactgccatggactctaaa

SEQ ID NO: 13541 - DNA, 669 bp, Gossypium hirsutum
tcctagcttgcattgtcttgtatttttctgttgagttcatcattttattttgtaaagaaaataataaaataatggtcagtaaaatagaaaaattgatatttgaagaaggagaaggagttgacgtgagagagagggagagaataaagtaacgtaagccaaaattttctgtgacttccctatttttttttatttttttaaaaataaaataaattaaaaacttaaccaactaaaatagaaattaaaaatattttagtaatactttaatctaccaaaattttcagaattaaaactataacaaaaatatttcctactaagtgtcttaaagattcaaacataggaactaagagaatacggacacttagccactaaaccactagactcactaatgtcctcccaaacgcaataagaagacataaatgtctaaccgaagtctcagactcatatgcaaaccttaattcttctaaccccaaaactgggatgatacatatatagatttgatagtgatatggatcagcgctaattggtaggacttccttaatgtaagtgagctactctttagcacgcgaggtgccttggtgtgtaggcatcaggccaagtggatggtatgttgtctctttggaaggaaacccaatgatagtttagggccaataagcctcgtatcgtacgttg

SEQ ID NO: 13542 - DNA, 732 bp, Gossypium hirsutum
  misc_feature (366)..(373): n is a, c, g, or t
  misc_feature (375)..(375): n is a, c, g, or t
  misc_feature (377)..(377): n is a, c, g, or t
  misc_feature (382)..(383): n is a, c, g, or t
  misc_feature (393)..(397): n is a, c, g, or t
  misc_feature (399)..(401): n is a, c, g, or t
  misc_feature (425)..(431): n is a, c, g, or t
  misc_feature (440)..(442): n is a, c, g, or t
  misc_feature (447)..(454): n is a, c, g, or t
  misc_feature (458)..(459): n is a, c, g, or t
  misc_feature (467)..(474): n is a, c, g, or t
  misc_feature (476)..(478): n is a, c, g, or t
  misc_feature (480)..(482): n is a, c, g, or t
  misc_feature (496)..(502): n is a, c, g, or t
  misc_feature (505)..(506): n is a, c, g, or t
  misc_feature (509)..(513): n is a, c, g, or t
  misc_feature (515)..(515): n is a, c, g, or t
  misc_feature (518)..(520): n is a, c, g, or t
  misc_feature (522)..(527): n is a, c, g, or t
  misc_feature (533)..(534): n is a, c, g, or t
  misc_feature (545)..(545): n is a, c, g, or t
  misc_feature (549)..(550): n is a, c, g, or t
  misc_feature (556)..(558): n is a, c, g, or t
  misc_feature (565)..(567): n is a, c, g, or t
  misc_feature (575)..(577): n is a, c, g, or t
  misc_feature (591)..(596): n is a, c, g, or t
  misc_feature (610)..(613): n is a, c, g, or t
  misc_feature (631)..(639): n is a, c, g, or t
  misc_feature (643)..(643): n is a, c, g, or t
  misc_feature (645)..(650): n is a, c, g, or t
  misc_feature (652)..(659): n is a, c, g, or t
  misc_feature (662)..(680): n is a, c, g, or t
  misc_feature (688)..(701): n is a, c, g, or t
  misc_feature (706)..(708): n is a, c, g, or t
  misc_feature (711)..(711): n is a, c, g, or t
  misc_feature (721)..(725): n is a, c, g, or t
  misc_feature (728)..(728): n is a, c, g, or t
cttctctcagcatccaattgcttcacaacttctgtctcctcagacagtgctttcttcacattcatccatttggatcgaattaacgggtcatcaagtgtgtttagatgcctaaacgcataaaaaaatgaataattttagagtaataactcaaaagaatagctaaaaagctaatttcttttaattcagtaacaaacatataacaatgcttattctgattcatgttaattgcgttttccatttatttcgtgtataacactgacatgatgcaacataaatcataaagataaaaaaaaagtactcaaaagaataaaaaaattatattacatagaattcaagattttgaaagcgataaaaaagtaacccaannnnnnnngngnagttnngcacagaggnnnnngnnncccaatcatgttactaagtatttnnnnnnngctaatttnnnttcannnnnnnnaagnngcagaagnnnnnnnnannntnnngagtgcgccaccannnnnnncannacnnnnntngannnannnnnnaaaggnnttagtcctaanattnnctaaannnagaaaannnttacatannngtgtgtgcgtggtnnnnnnatgtgtatgtgtannnntataatttatagctgttnnnnnnnnnttcncnnnnnngnnnnnnnnttnnnnnnnnnnnnnnnnnnnctttctcnnnnnnnnnnnnnntatcnnntcntccccccccnnnnnttngttt

SEQ ID NO: 13543 - DNA, 461 bp, Gossypium hirsutum
gctctagggaaacctgcctgtatactctatcaactcgaattgactgacccaaaagactaatcatagaaaactctttagcagtattctcagcggttatacccagattttccagatttatagaaacaacgctagatatgtacgagtgagtagagccaatattaatgagagcataatatgaagcataatgaataaagaagatacctacaatgacatcagaatcattgctctcctcgcagcatctcgacgcataaacctgtatcgactaacgatcttcagcttgacttacacctctacccgatgttcgctgtcctctccttgatccattaccaccataccagtaccatgacccttgaatagtttttgaacctctctcgaagtctgaatagaatttggagccaatttttgtgctatagctgacactggatctggtcgacgagggtatcactaactcgatgctacat

SEQ ID NO: 13544 - DNA, 484 bp, Gossypium hirsutum
  misc_feature (456)..(456): n is a, c, g, or t
  misc_feature (458)..(458): n is a, c, g, or t
  misc_feature (460)..(460): n is a, c, g, or t
  misc_feature (463)..(463): n is a, c, g, or t
  misc_feature (474)..(474): n is a, c, g, or t
  misc_feature (477)..(478): n is a, c, g, or t
tgcaacttactaacaccggacccacgcctttgtttaactaaagtaaatattgtctttttactaccatttgcccacaaggtagatctattgctttccttccatttttctttttaattaattaatttttttaatcaaaattaaagtagcaattaacccaaatttaaaagcgcagcactaacagaacccaaatgaacgtagaaaccatgcagactctgctttaacaacttcaaaaaccctaatttttctgttttctttttaaaaaaatattaattataaattcaaataaggaatacttcggagtgtattattattttaaaataatacatgaattaatgaaaaaaaacctagagtaataattttttttaatttaataaaagacatattggggagggcgggggggcaaaaagtggtttttaacaattattagctgttactcaaaaaaaaaaaaaaaatttntnantgnaaagggaaggnggnnaaaaaa

SEQ ID NO: 13545 - DNA, 580 bp, Gossypium hirsutum
aaatgaaatatatttaccagctttgtgagggagagcaatccaattaccaccagttccatatttctcaatgtagtccttgagcttagagtcttcttcaggagaccaaggtcctttcttcacacttgccttgtcacagcaaggagccctccccatttctctctccaacacaactcttgtgatccccttagatatttctgttgacacctctttttacaaaccaaaccaacccaagccaaacctctctctccctttctactactaataaacttccttgctgactgcttccttttaataggaaagatttgtgctcacaaaaatacaaaaacaattgtactttggattttattatttattaacaggtacaaattatttaatatgtatagtttctaactgttacgtctaatttagaaaaaataatttcactttgatttcttttagaaattaaaaaatattattataataataatatatgtttatatttatttaaatggataaaaatattacccattatcaaagacatcaaaagtccaacgttaattgtttattggaaaacataactatatacagaaccctgccctac

SEQ ID NO: 13546 - DNA, 455 bp, Gossypium hirsutum
  misc_feature (42)..(42): n is a, c, g, or t
  misc_feature (44)..(45): n is a, c, g, or t
  misc_feature (48)..(48): n is a, c, g, or t
ttttcaactacaacaacaatactaaacaaagggttttcggcntnnganccaggaaactgaatgctagatgcttttcaaatgtacttttcaagtacaacaatggtagactacacattttgtttttgtggatgcataaagaagatgttacgtgtggttctaataatttgaactcaccatataaagcatcccctttctctgcatgatcaaactcagagaggggcattattatggattgcagcttcacttgtccacctcttttgttctgagaataacaaacaaaataataaggtaaataaataaataatagacaaaaaaggaaatcatattaaatgataaaccattacaacaatacctggtattccatcaatttctcagcatgctctctctcttctaagcttgattccttgaagaacctatattcatgaaaaaagcctaaagttaactcagttccacca

SEQ ID NO: 13547 - DNA, 525 bp, Gossypium hirsutum
ctccaatgtcttctcccacacttcgaatgaagtctcgacactgtgtgcttcttcagaaggatttgtcggacgacagtcttgggaaatgaatgcacaaacgggccactcatcggctttcagcaactcacagtattctggaacctggggatctgtagccgagaaaagggcactcctagaacctacattgatattgagtgacggaaaaattagctcccaattccccttactcctgtttccattaaagtttctctattctagtaatatgttatcagaaactattttctttgcctcacagcaaaatcctttaatacatgaaaaatcttcaataaattgggaatccaaatttttaaataacttgaaaaagtttgaacttacaattaaaataggcacgaaaaaaaattatgccaattttcaaggttgaacaatgacggaataaatcgtatatagatactattccaaatgaatgctgttttgttatttattcaaccactgcattccaatctatccactttgatatccactttg

SEQ ID NO: 13548 - DNA, 541 bp, Gossypium hirsutum
tttttgtttggttatttttatggatttaatgaattgcctttcctgtcagagttgggagttttgtttttgatattttgagtttgggatttattgaactgtttttatttggtatccaattcatggagttttttttttctaaacatttattgaattggggtttaatgggcttagtgaactccatttttgggaatgcatgcttttgagtcatggaaatgacttttgaagttgtttgaattttaatgtttagttatgtcatgtcactctttaagttttcattggataaattcagtttaattgagcagattttgggttgtcttgatatgctagcatggtggagatgtgcatgcggtggatcataatggacagacagccttgcactggagtgcggtccgtggtgcagtacaagttgctgaggttttactccaagagggtgctcgtgttgatgctgctgacatctatggttaccaggttagcattttcttcaatgcggtgcccagaattatattctttctcattcaaaaaattggcatggctccccatg

SEQ ID NO: 13549 - DNA, 652 bp, Gossypium hirsutum
gaagttgctaaaaattaagaaaaagatggtaatatataggaagatgagcaagggaaagattcccaagaccaagaagggttaatatattattactttaaaaaattacaatcaatttatcagcctgttttgtaatttcatattgtgactgctatttaaatttccactaggaagaacaataataataagatgaagattataccttagatgcgtcaaaggggttgttagaatcacaattttgagggtatgacccatcattggcctaattacaatgatgggtcataccctcaaaattgtgattctaacaacccctttgacgcatctaaggtataatcttcatcttattattattgttcttcctagtggaaatttaaatagcagtcacaatatgaaattacaaaacaggctgataaattgattgtaattttttaaagtaataatatattaacccttcttggtcttgggaatctttcccttgctcatcttcctatatattaccatctttttcttaatttttagcaacttctgttgctacaacttttcaagtattcttgtcttacacatatttggtcataaaaatggaggtatagtgttaaatatatagaaaaattgattcataggcatgttcttgcccttagccaaatggtataaatct

SEQ ID NO: 13550 - DNA, 487 bp, Gossypium hirsutum
ccctgtactgaagtgaagcgtaatatatgtatgtagtttttgcaagtctgactatatataatatataaagcttaaaatatatagtaaactctaaagtatggtctagttttatctacagaacatgcaatgtttttattgatcaataggcatgatttccttatagtcaatgtctgttgctgaatgctcaaatatggagaagtacatggtttgacatgatctttttcatactagtaaagatatatgaaatgagaaacatgaaaaataaaagaaattaaagggaacttcaatcaggagggaattttttatgcctatcgcgatacataaaagcatgccaaggcacacacccgtgtgcctaatcaaaagggccttgcttggaagtgtctgaggcatttttgttgaataatactaaggcacaaggcacacaccttgacaacactgaataaggtcacgcacagatttgaaactgattggacaaactgagcacata

SEQ ID NO: 13551 - DNA, 638 bp, Gossypium hirsutum
aaagaaatgattgcttaatcaaaattaacattaaaaagggtttaaatatataaaacaatttttttaaatatgttatatatatctaatccaacgtttcataaatataataattgaaaagtgtaaaaaactttatataattttaaatagtaataaaatgttatcaatattttataccggctaaattaatcgtatatataaaaaaagttaattgactaaatagatcaatttttaaaaaatttagggagataaattgtttttagatagagaatgtaaaaaatcgtctagttgggcactttttctctacaattagtaggaaaatttgtccaattgagcacactttcactcactctctccaaaaatgatttatttctctaaatttttaaaaaatttcggcctataaaaccaatcataccactagaaatgctttgatttgtggttgagtgagcgactttcctgtattttgatctttgaactccaacaagaaatctaggaagtccttactagtaattttcgtaccttgtcctataagatcacaattatttttatttctttcatctatcacaaaatcgaaaatttgttctatcaatcgtgatgccattttcatatctctttgtaccccttgaatgtcaaagtaagcc

SEQ ID NO: 13552 - DNA, 456 bp, Gossypium hirsutum
ttgatccaagcactcaatttcactctttttctttctttatttcctttctttcttgtctgtttagagtgcaattaataggtaaaaatgtagagtatgctttttttggcttatatctcacaaatgaataatatatgaaattttaaaaaatatatattcttacacataatatctaaaaaacaataaaactcaccaaataaaaaaaattcaatgtaaaaaaaatctaaaagattgaaacattaaaaagaaaaaaagaagaagagaaagattgaaacttatgaatcaatagaaatttattcaggtattgaaatcaacatcccgcacgatgttaagggttaaattcagaaaaaagaaaaaaatgagaaataagcagagattagtagagaaaagaaggagaagaagaagctaagaattcaggagtatacaaggtaactcaataacggattcttctaacaacag

SEQ ID NO: 13553 - DNA, 419 bp, Gossypium hirsutum
ggaagatcacaaacacgattatgcaaaccccactaaacaatttaatcactttgccaaataatgcaccatttttcactcaaaacttttgccatctttgttcatctaattttaatgcttcttgaaagtcaaactatatatatacggttaaatggattgagtaatgaaaaaccaacatgaattcaagtaagactaaatagtgcctaatagaacttgttggaaaaagccacaaatgccaaaataattattaaactagccaaagagaaaaaaaagaaaaaagtatcaccggaaaatccagcttattgagatgggttttcttccccctttgaaattctaaaacctttgactttacattccaaaatcttcttgttttcatgcagtcaacaacatttatttggtcaacccatcatcttcttcttcca

SEQ ID NO: 13554 - DNA, 640 bp, Gossypium hirsutum
agtcggatatttacagctttggggttgtcctcttggaactaattaccggtaggaaagcgattgacgagacaagagatcgctcagagcaaaatctcgttgcatgggtaagacaatgtttattctgtttttatcattgctcattgatgtttcgatatatcgggatagtcgatttaacttgtaatgaatatggttgctgttttgttatcttcggtttatatggaaatactgtaatagccgtaggctgtttgtgtcatgaatgttttatccccgggatatttctcctgatttcaatgagagcccgacgaagtccaaatgctcacatttccttggtggtgaagcgttccctaaactccatgaacctggttgggctctcctcggaatcgagagacaaaaaccccgggttaaaactgagcataaacaccttggacacaatacctccaccgttgaggggtctgtcggctcccctgaactgtatcatattgggtctgtttaactagcaatgaatgtggttgcagttttgttatcttcgtttaatacggaaatactttaataactgccgactgtttgtgttatgaatgttgtgatgaatgtatggcaagtagtcacttggatcagtttcataaattcttatccaacgttt

SEQ ID NO: 13555 - DNA, 491 bp, Gossypium hirsutum
aatctatgctgttgacggactcttggaggcatgttcgagagagcttaaacacatttgtatttttcagtgttccatagaatattctaatgagctgtgtcaagttcattaaaaatgatgtaaaaagtagtataaaaataagcaaaaaggaaattaaattaaataaactaatatgatggatttcaagctttaagctcaattttgttctagtttcgaaccaatgcacgataacaagtcttctccttcaaccaataagttagttatagtgatcaaggatgcctcagaccaccaacccttctatatgtaattaattacgagaacgcccaatagttaatctttatcgaacgaacaaccacaaaacacgcatccacgatttagctctccggtagccttgtgagctaaaagggtccatctcgaaccaacagcgtcaattacgcgagccgtttagatccgattgctaacttcttagttggacacgccaatgtgatctaata

SEQ ID NO: 13556 - DNA, 631 bp, Gossypium hirsutum
gaaggatttattgttgtgcagaagttttagttcatattcattaaatagtcatcagaacctggaactcagggttttccttttggcagagactttaaccaattgagtaaataatattaccatcaatctattttatgagatatttttgcaattttttctaccatttctttatataaaatttgttggtagagtgaacaatcttttgcattcctataccacatatgcatgcttgagaaggggtcctctgaaagtataatctttttttggcgtaaattgactagatctttatatatatatatatgtatatcagtgttaaatctgctaaaacatcccagctatttgtaactatttgtattgtggttctgttttgttttcgtttttgggcatggagacggatttcttatctgattgctattcattaacataaacttgtgaatatgacttgtttacatgaactacagatttgtgttatttgcaagcaaatccatggttcttgctcaaaatgttgcaagtgttcaacatattaccatgccatgtgtgcatcaagagctggttactgcatggaggtaagttacttttagctgattttccacctaatacttgcagtgtcattttctttaatcaacgtaatatg

SEQ ID NO: 13557 - DNA, 569 bp, Gossypium hirsutum
aaatctagcctttcgtggcacttggtgggctggaggttgcttgtgtattgtatacactttacaagagggaaatcagctactatgtctaccgataaaaaggagagatatagcagtaaactggataggtttcttcagaatacttaagtggcaatcattagtaacctcgcggttataagggtttaacatttcattcttggataggataacttgcccctcttaatctttcctcttatgactgtttcactacttttatgagtacaaggtagaacaagtaataaagaacaaagggtaaagacatccctaactaacaatacagcataagagaaaaataaaaatcatagcttagcttacccttcccaaccccttgaagagcactaataggttgccaaagtgctgaaaaagtgataccaatgctgaagagatgcactgtactgccagccatccacatcatgaagcccatcattagcaaattcttgaaaggtgcttgtgcaacttcccatgctttctgttcaaaagtaatagaaatataatcttaaatcagttatatttttcctattgtgcctctgatt

SEQ ID NO: 13558 - DNA, 379 bp, Gossypium hirsutum
ggatgttcgcctgtcctggttcttttgtgtgtgttgctttagtaaaattttaaaataatttttaaaactttttattttttaaatatattcttatgtacatgccacgttaacatatttactcatgtgacatgtcatgtgctagtttttaatgttttcattcgtcatattagtgttcattattggccaaactgatcaacgacactttctattaatggaatgacctaattaattttttatgctaatgagaaatcaatcaaatgtattttttctataaagactcaatttattttattggaaaattaaaaaaaaaaagaaaaactgtcaaaatcttgcaaagttttggctatggaaccgggaaaggtgttcttctttcccttta

SEQ ID NO: 13559 - DNA, 540 bp, Gossypium hirsutum
cagcttagtggccacatttacttctgggtttaaacatcctatgattacgtttcgtaatcaacgtaggattataacccatatattttatttacttcatataatatttaagtgtttagttgacggaatgtaaaattatttaaaaaatatattttaatgtattgccctaatttgattttttaacaaatttagttcttagtcacaattttcataaaattatgataaattattgaaattcttatttttttattacaatttatatattaataaacatatgatgtgaactaaatttatacaatcataattaatatactaataaataaattattaaagtaaatataataattatagttttaaagtaaggcatctactgtttcactaccaagtaaaaacaatatttttgtttttaatttagctttaaattttacttgagaaaaaaatttaaattgattaaaataataaaaataatggataaattggttcaaaatttaatattacactcataatctaagataatcaatgggatgggtcataatgagattc

SEQ ID NO: 13560 - DNA, 617 bp, Gossypium hirsutum
ggtcctgcaataatttccagtatattgttagtttccccatacagaaagtcatcggccggcagattatgcccccacaagtgaatcaaacatggtggaataatagtggagtccatcaatgatccaccgtgggagagatcttgctcaagcaatgagagacttgatccaattattcaaaaatctcaacgccttcatcatatagggtaggacattgaaagccttgcatgatattcaaggtctatgaaccctcttgagtcaacaaaatgactcacggatagcttggtggaggaaaaagaaaaaaagtgagcgaatttgataaagggagagagagacggaaggcagacagaacatcaaaagaagactgcaaatccctaaacaagacttaatagccctactagacatggcattagcaaaatatgcaacactttcagcactagaaagagcacataagaagaagccactagatcagttcaagcaaacattctatgagcttcttcaagattgtcaaccgagagaacactccaaaagaagcattattagcttaaacctagctcgcctaacctaattaactatctatcattccctccattttcaccgcagcttccatccaaacaaacttc

SEQ ID NO: 13561 - DNA, 637 bp, Gossypium hirsutum
ccttgctatacctgcagctatgtctagtctgatacctttattactgctagccaatgttatcttaccaggaaatgcatggttgttaactattgtatttgtacctctttaaaggcaaagtatagtctacaaagttctcattgtggttgatatctataagccaggaaccaagatcaaagcaaaaaaaaatacctgccatgaattgatgcaaaggacattagcataattttgcaaccattcttccaactttgtttgatcctggttgttccatgtcttatcgtcatccaagttccatgtacaaacagctaaagcatataactcaggattaacacgcccgatgctgcaaaaagaacagggaggtcaatagcatgacatttttcatggaaatatgaaaagtgaaaaaagcattacaactctcaatgcaaaggacatacttaaagtcagtaaaatataaaccaaaaattaaggcatgaatttatacatacataaacttcacagctcttgaaaactataaattctaaaccgcataaagagccaccatcaaaaacaatctcttaagggggaaaaaggtggggggagaaggcagcgtcttggtacatgggagtttgttgaactaaagggcactttctttctactccaa

SEQ ID NO: 13562 - DNA, 654 bp, Gossypium hirsutum
  misc_feature (64)..(64): n is a, c, g, or t
agaggagttgtttcatgtttgggaaaccttaactgtccagtggaacgtaagtggaaatttcatntaatgcttaacaatgttaagttctaatggccatttcactgtggttgtattttcctgcaatacttattgaattgttgtttcattatacctcagcttcgcactatctttatataaactgtggagggaaagaagaaactattaacaatatcacctatcaagctgattctgatcctgccgggccttcaagattttatagaagtactactcattgggcatttagcagcactggtatttttttggatgatggcactgaaaaggatgtattaattttggaaaaaaaccaactttcttcgagtattggtcagctttacatcaacgcacgtctttcacctagctctttgacttactatgcgttttgtttgcacaatgcaacatacaacgtgagcctccattttgcggagatacagttcactgatggtaaaaattatagcagcttaggaaggcggatctttgatgtttacattcaggtatttcaactcatatcttcttaccaagttctgatattagaactagagccagtgaaggctcttcgacctaatatgggttcaaaatccaatctccggttaagctaagattacagccatgtgacta

SEQ ID NO: 13563 - DNA, 623 bp, Gossypium hirsutum
tataatgcgtgcattcattgggtgaatttaacaaagttgttgcatttcaaggtaaacaaggattcttgacagctaagttttcagtgattcaatctaatccaactttcttaattcaaaggattagataagggcgatctgattcgatccaatcttttaaatatgtttcccaaagtgattcttcattgacgagctagatatcatctatatattcaacccatctcataaatacggttcaataaattgtcaacatctcaaatacgaaaacagtctaaaacaactccaatggtgagggaatgggcactcctttgacactcaatttgccagttccatatttttttaacatttttattacaacttatatattaatatgtaaatatatgttgttgagataaatttataatcattattataataattcatgaaaagtaattgcataaccaactagttgactttaaaactttttcaaaagaagaagaagaagaagttgataaaacaaatttatttttaattaaaattatattttatctacatatagattacctgaggaagaagtagtattgaaattactcttatactctagaatattaacactatttggactgtgaaattatctcctccgaaaa

SEQ ID NO: 13564 - DNA, 595 bp, Gossypium hirsutum
gatgttgtctctctgtttatgtctccatttctttcttttcttttctttttttctctctcttgataaataaacatgatatcgtcctaggacataggggtaactacttagggttaactgcatcatttttctgttgtatcacaaatgaagttaaagaccactctagagtgcaaaaggttatgaatttgactgatcaatttaaagtgggaatccaagcttcaagaatttccacaaggaaaggctaattttgaatttctagtgcctgactccagtaccataactatctactttgcagaaagagactctcactcattctctcaatcacacacacatgcatacaaatgtatgccagcctatcggcttgtttgttaaggtttgaaggctataaaagaaaaccaaggatcgcaattcaaaaatcacaacagaacgtgaaaaaatgtctttttcttattctgttattgcatttctatcgttttatctttgaccgaatgaatttcggaatccttgatgtaggttgcattacgctcaggtcaatttaaaggagaagttaggttcaggtacgagaactccttttgtgcactggtcttccataaagaac

SEQ ID NO: 13565 - DNA, 680 bp, Gossypium hirsutum
cgagcatttgagagagtgtaactattgcaatcgagacatttttaagtccaaggtcccatgaatttgacaactagacaagggtttaggcactttataacattcattaatgacaatacttgattaaggcctgagaatcaataaggaaaaatgattaaggcctgtacttttcgaacaatttcaaagggtgtgtaatgaaaaaagaatagcaagccaatcgagtattctgaaaaaactctaacaaaatggagtgacaaagggtaatcgaactcacctagtttgagattcatgatgtcaaaggctaacttagatgcctcctatttgggacatgccttgctcacagttatctacattttaaacacagtatgaccttatgaacttggcaaactagtacaaagaggaaagaaatgtgttcttggttattctaacacactgcaaaggttatgtattcattcttgcatttggagtatgagaatagatgtattgatttctgagtctgagacacaacttcctcagaggataacaagacttgtttattgtttgaactcactaaatgaactagtggtgagttaataccagtataccacttaatcaagagttaataatgttggtccaagtgaaagcttagtgcttccacaaaatgctagtgatgatgagaagattgaccaagattaccctgtgga

SEQ ID NO: 13566 - DNA, 603 bp, Gossypium hirsutum
  misc_feature (591)..(593): n is a, c, g, or t
ccactagaatcaaattcaaacgacgtcaagacagttcctttgacgaacttaactcctttagattgataatattcctcatagtagcttgcaatcttcggtgtaaacaaacgagccactgccacatcgaaaaaggaatatgatttacttaaacatactctttatggtccagaagcttgaaaacaagaacgagatcaagaaaagaacaaatcactatggacactcactacaatgtacttcgggaaaaaccaaggttacatttattttattgattgccaaagatgccgcgcattccattccaatgtacccaccaccaattactacagcgtttccactggaacaagattgcatcacattaacaagaccgtttgcatctgctaaatctcgtaagtaacatacattttcagcttctgatccatccactccaaattcttcaagcttcaaagcctacatttaacacaaaaatggaagaacaaaattaagccagaaaagtggacacattatccacgagaaaaatattggcactctacaattcaaagaatcataaattgtgccaataacgagataaactccaaaattgacgattgtgttaannncctcctgttg

SEQ ID NO: 13567 - DNA, 647 bp, Gossypium hirsutum
tccagcaaaccttcacttcagaacaatgcgatatccttatctaaaacaaaactctagggcatccgcactcaaacaagttaagaattctttcatttaaaaaaaaattaaccagagtaatatagacattaaagtttaaatgaatgcaactcaaattttgcatagaagctatctttattattcttagtgtggtgatgattgtgccccattctacaacagcaaacaggcaagtggagaaaacttcttttggttttagaaaaatgcatctgtctattatcaaaagctgattcattcttctcccaaaagacaaaaacatcaaactaagccagtttggcttaaaatgataaggatgattgagtcatggtgtcctcttatttaaaaggaaataataactatcataaacaaatcaaactgaacattcaggccgttagagtagtgcagcaataaaggctacttatcatatgaagaaagcagaagatccaggttccaaaatttagtccctagtccctaccaataataataagaaaataaaaaacatatgatgccaaaaataaatcaggaaaaaagtcttatcaacaagtgctcgagaatcaccaagaaataacatagaagacaagagcttttgtccagtaggagtcccaacttcaact

SEQ ID NO: 13568 - DNA, 621 bp, Gossypium hirsutum
ggagccaatttgtatggagctattgatatcggtattgttcccggtactaattcaataccaaattcaacctttctgataggtggtaaacccggtaactcttcacgaaatacatctggatactcgcacacaactggtactaattcaatctttatttctatcactttcttatcaagtacataagcaagataagcttcacacccatttcttacaaatctttgagctaacatagacgagatcacaactggaaaactattcggatcatcagattcaaatttaatattctcattattctgacattttagttcaattgtctttcgtctacaattcactatagcatcatgcatcgttagccaatccatacccaaaatcacatcaaattcatcgaatggcaacaacatcaaattagccagaaaacagaaatcccgattcattaacggaaaattgttgtagactttgtcaactaaaacacatttgcctaagggcttcgatactctaatcacaaattcagtagactctatagggaaagtcttactagatattagattcatgcatatataagaatgagttgatcctggatctatcaatgcaatcacattagtatcatatagagtgaaagtaccg

SEQ ID NO: 13569 - DNA, 407 bp, Gossypium hirsutum
tttaagattaaaatgctatttgtttggcttgtaatgtaatacggacttgcttaaacatgtcatgtttgatgtttctgatttactcttttcttatattgcatcacagtgtaacagtgataattgtttatgaatagatatttgaaaaggttagcatccaaagtgctgaaggtggctctaaagagaaggaagatgatcggcttggatcaaaagctttttatgctttcatttatccaaatttcatgattaacaggtctttatgtctgttcacattttatcacttgccttttgtctttccactcattccagtaatatatatttttctattgatcttgtaggtatggaccttggatggacaccaatctggcaatcccattgggaccaagggaatgcctggtagtgttcaacta

SEQ ID NO: 13570 - DNA, 639 bp, Gossypium hirsutum
atggctgcactcacttcaattacccccaacccagcttcatcctcttcagtatactccaatttcaggacctctccattgactctctcttcccagattattgcagactgttcttgccttttgagtgtaagatcaggtctagcatcaaggcaaagactggcttcccggaatcggcggtgcctaattatccgaagtgcagcaacaaagcctgcaaaatcaccaggtaccactactgttgtagtccaaccttaatttaatcataagatgaatggtcgattgaacctcaggctcaggaacaaaacaaattggctgacctgattttgattttcttctcttcttttggagggattagctgaagaagattggaaggtcaagagggaacttctcttggagaaaagggtattccatcttccactctcatgcttaagtacacattttgatgctgcatacatacttggaaaatttaaaatcgtcactctcaccggttgatacaacaaacaacccgttccccttataagttgctacctaatgattctatatttagaggatggaagtaaaaagctagaaatatttataaataccatcaaatatcatgaattgagaagaagaatcccctaaggggggataaagctcctgtacaca

SEQ ID NO: 13571 - DNA, 611 bp, Gossypium hirsutum
cttgtgttcaaaagcttaatagcagtatccatactaaaactatatacgatacaaactgagcagcaattatgttcctatatatataattaccctttagcttccggatactatggtgttcatgtacatggatctagaaataggaattgtggaaccaatttcccatgtcttctgcaccatgggaacataatttatatagtttcttggagggtgtcatataaagtctcaacaagattgagcaggaatgcatcagagccatgttttgccactagggaaattgccaaaggaacattatcatacctccctagaggtatgctaacctgtagagaacacagggtaacccattccaagaaagctgccaaaaacaaagacaaaaaagggagcatatcaagtccgaacctgacagaaaccagatgatccagcaacggacaataagctgaaaggcctagaaaagaatatatccgatgtggctggatttgcttgcacttttggtggttcccctggtgtcgttgggagagcaaggacgccatgatcctaaaagagccgatataagtagattgattcataagaaatgaataagtttatataaagagtccgtatttgcctagtactgg

SEQ ID NO: 13572 - DNA, 656 bp, Gossypium hirsutum
agccaagtgttcaagtaatgaaaagtattccctgaccttaaatatatataaactgtagattaaaggaaatcgacctcatttaacactcaagattaaatttatctttacttgttaaacttaccagtaaacagagagtaggcttcccgtaacatacctaaaacttgatagtccagagaattagaacataactttttcacattgtcctaatcaaattttcacatcaaccattaattcactgattcggaaaattttgaattaacccccaaacagcacaagaagattgttcaaagaatcaaattcatgcaaactaatacgatgaaaaccgaagtcattaaccaatggcttaaaaagggaaaagtgaccttaattttgttagttccttctccttggcaggatcccctatcttaagtttgtctgcttgtacaaatgtagatggtctatgaatgaagtagatttatttatcatgcagttctaactgctaactccactaaatagaaatcaatgttacttaaatcacttgctgcaaaaagaaggcaacattttccaaaagcttcttaaaatatgaattacacaaaattcgaagccattttttttctgataaggtgctatcctagaagacatgagattcttcaaacagctttgaaccgacattaaga

SEQ ID NO: 13573 - DNA, 573 bp, Gossypium hirsutum
gtgtgatgaagatgattaagaaaagagaagacagagttgtgaatggagaagctgatagctttggcaatgattttctaggattacttgtaaatgcctatcatgatttggacgacaaaaacatgctttcattgggagacttggtagatgagtgcaaaacattctaccttgctggacaagatactgttaattccttacttgcttggacagtcttccttttagcaatccacggagattggcaagagaaagcaagaagagaggtgattgacatatttggtaaccaaaatccacatcctgaaagcattgtcaaactcaaaattgtaagtaaactatcaaaccaattcaatatatatcttgtcttccatggatttgaatagtgacagcaacattaaattatgtgatgtaatctgacatatttctattctacaaacagatgaccatgatcattaatgaaactttaagattatatggtccagcaaatggcataatgagaaaagttggaagagaagttcagattggaaatctagtgttacctgctaatatagatctttatattgcaaatgttgtacctcacat

SEQ ID NO: 13574 - DNA, 500 bp, Gossypium hirsutum
tggcatgggttaaacatggatacttcaagcaaaaatgaagagtcggagtaacttagataatcaaaacactacagcatattacagatcaatgaccacggactgattgaatagcctctatttggcaaacttaaatgcagagtatccatgagaaaaaaattactaatacagcaaggccggtaattttatgtggcaacttccagttaccaaagatggttactatgtgcaagtccaaataatatgaaataattttgattcttggctttttgtgttctgcaatgacaatgactgtacatagcagacatagggatggctgattcatgatgttttaatgcaactaaatcaaggttttataccagtagaatcctttgactatcgtatttaaagaagtaatttctacttagaataagttttaagaagtctcactaaatacacaatgtaatacaatcctttagaacttcaatcaagtaaaatatgagccaatccaagaaccatacctttga

SEQ ID NO: 13575 - DNA, 654 bp, Gossypium hirsutum
atttggtaagggaaatcgtgaaggtgatgaagtgagaaagaatttttaagttgaccaggccgccatgccatgccccactccaccccaccaaaagttcctttgactcatgtgcattaacgtccatggatggtttccactaatgaccaaataatgatatgtttgacacttaatatttgttcatgtaattttaccctcttttgagaatatttgaatgatgttagccctttccctcccctccctccatcaccataaatagccctaaccttcaaatttcatttcagttccttcttatgaccaaacacagcttgttcagatattacttattatactgctttgatctccatacatggattcttctttttttcaatacccaaatctccatttctcctctgaatcatcttcttcccaaatttctcaagaaaatttctcaccacactcttcattcagctatgcccgaaagcaggctcttcctttcaatgaaaatgattctcaagaaatgcttcttttgggagtcctgaatcaagccccagaagcacactcctttgacaccacatctctcactagtttcagagatgatcatgaagtcaactccaagcctgtcgaagaggagacaggaaaggagatttcttacagaggagttaggaagaggccatg

SEQ ID NO: 13576 - DNA, 426 bp, Gossypium hirsutum
tcccactgacactgaatgctttacttaccgcattttcaaggtaaaaatcatgttaacgttataataaaacctgagtaggtgaggaggaccaaattttgaattaagagttaatagatattattttataaaattttattggattgaaaagataactcgaaaatatatgaaacattaatttctcaattctcttaaaagatttatcaactagtccattatttattggtgaattgcatgatatgtatcaaacataaccataagcactcattcaaagaacaaactcagatgtgtttttctcaagattgtgacctccccttttcaatttaatattaattgaagataaagtccaatatgaatgcattaagtgagcagcagcccaaatccaataagcactccccttaccaccaattgtaagccctgatggaaacc

SEQ ID NO: 13577 - DNA, 601 bp, Gossypium hirsutum
tcgattgtgcctatagactcttgcactaaaacaagcctttgatataagttctctttatttcttatttctgaataagagaaactcagttcattttttccatgcattagtatccatttggtatgattttaaaatttgagaaatatgcgtatcattttgttttgtattattttaatctttgtcatgtatattctctttttcccattttcctcatatagcatttatcagtgtacaaacaggcagcggcagcaccatgcggaagaaaaaccttatcgtgaatcttatacgttcatgtagagagaaagagatgaagtttctagtgagaactttggtaagatttgaaaatgatatttcttgtatgtatcttatgtaggtgatttttgattttatttatgtaagtatctggtatgcaacagtatgaaaagagcagaaggttaatattttatttttgataggtgatatcttttctgaagatggatagtgagtttctttattatcatattagagtttagcacatttgacaagatcttatcatattaatattccccaaattgatgcttctttcgtagtagatgtgatcaaggcaaacactatcttgtgatgt

SEQ ID NO: 13578 - DNA, 667 bp, Gossypium hirsutum
tcgtgttcaatcggatatttcagagttaaaataccacgtttggagtgagcctcatccccaacatatgcatctttttgacccataccaaccatcacaccagtgtgacgtggacgccccacgatgctagggaacacagcccttggagcatcatcaccagcaaatccagcctaaaaagagagaaacacatcattagaaaatatcatatatatatatgaaacatgatagagtatcctaaactgttaccttgaccattccagttccattgtcgcagacaagtgggtgaatatcctcaccatcagccatcttgtattaactaaaacgtgggaaataagaacaacatctcaccaatacagagaaacaatccacatttcaacaagcatgctttgaattagttatgaaccaagaccaaatcatcctcgttcaacgataaaatatgaagttatatacaaaataaagtttgtgacagaattcctaatccaaactataaacaatccatcacaaacattttgttcaagaaaaactatgcctagacatagaacacagacccttcatatgatcttacattctcattttttttaatctattttattgatacgataactagattcaaaacattattaaagtggaaataacaaaacatcagtgtgtgccgtcattagaagccaga

SEQ ID NO: 13579 - DNA, 531 bp, Gossypium hirsutum
tgtcaattgtttcgggctaacctcaaatatacaaaactcatattacttgtcatgccatggggaatccctccttggaattgattgtctaataagtccagcgtctgaagttggtcactgaagaatatggggaggttgccattgaagctattcttggaaagatctaaatggcgcagctctggaaaattcaagttgatatcttcgagtagtgtcacgtgtaagaaattgtcagaaatatcaagaagagtaagctttgaggttatgttctgaaaattgctaatgaagggaccagtcaaattattgccactttgccataattctgaagtgatattgtgaagcatccaaggagaaattttcttgacactacaaccacttaaagacagaatacttagtttgaaagatggagaacaacttggtgacatcatctctgtttcaacatccaagtgattaaaagaaatatcaaactcacttaacctcgacaaattagcaaaaacacagagcgaaatcatgccttggaactcattgcttgataga

SEQ ID NO: 13580 - DNA, 536 bp, Gossypium hirsutum
ctgctgcttctgagagcttacttcgatgtttaaggtacagattttaaacaataaaatgaagaaatttgattgaagaaaattccaaaatgaggaatcatcaaatatgttaaatgtctttgttttgattctctttaccactttgtcaaatttattaatatgtttgtgacagaaacctttaaaacatgctaatctcgatggaactatactttccccaatcaattgtttctattgtatcctcattttgcatgtcttcggtcttgccggaaaactttttgttctttgcttttatgacatattcggtagactattttatcttgcagcttatattccgatcttactacctcggccaaggaagacaaccctcagccgaccgtggatcagttcttgactctccatgcaagcttgaataatgctcgcatggttgcagattctttatcgagaactatcccagtcggttcatctccggaatcggaaggtaccgtatcagaagaggcagtaaaagtcgcatcagatagacggaaatatgcagtttcgtg

SEQ ID NO: 13581 - DNA, 406 bp, Gossypium hirsutum
tctcaagttgaatggaacatctttcccctctaatacgaaatatccttagcttcaatccatagaccaccccctatatatatatatatataatgaatcaaattgtgtatcattatatcactttcattaatggctcttgaaagctagattgacactaattattggtctaaaatcttgttattcatcttcaacataccaaactgcccccacaacatttttaaaaaattcatgtaatggagcatggggaaattttgcaccaataattattggttttatacattttttaaagtttccatgtctttttttatattattaatatcttaataaattaatcggaatttaattgtttattaaatcttaattgagtttacatcataattataataacaatttacaacaattaggatga

SEQ ID NO: 13582 - DNA, 586 bp, Gossypium hirsutum
  misc_feature (546)..(546): n is a, c, g, or t
  misc_feature (549)..(549): n is a, c, g, or t
  misc_feature (551)..(552): n is a, c, g, or t
gccgtaacaagggacatgagtcgaacaagattacggtaagttacgctcctgagatgcgatcggcgatgaggagggaacgaaaagggatctcctacgcctgcctcttgcggttcttccatcttttccgccaaaaattaacttctaaattccctctctcacagttatttttgcggacttaaaaccctactaaagggttttttttctttttttccttttttaaatttaaacatattttctgtttttgtccttcgaagttaatgcgggaccgccatttcaaggcttttcctccaaggttcacgaagcgctagcgttaatacgctgtcactgaaacgacgccgttgggtgcgttagagttagacgcttcgaaccgttttactttgggaagtaaataattaaaaaaaaagaaaaaagaacaacaaaatccaaaaccctagcaaagcagcagtgtttgttgaactggttatcgaatcatatcggtaagaagctaagagactatgtgaaagaagaaaaatggtagtgaggattcgattgtctaggttcggatgnaanannaagccattttatagggtgatggctgccaatagca

SEQ ID NO: 13583 - DNA, 600 bp, Gossypium hirsutum
ttatacttcttccaatgtagagcacggacatagcttgccactatttcattccagtattttgattcagccttgaagagttcttttctagctatataggattcgatatgtatgctctgcagcctgtcgggtggggtttgcaaacgagcaggccaaggagcaacgtttgcaccatatccattctcaggaattcgactaatacatgcctttagatcaacatacctgagagattacgcaaacatcccaagactaacttaaaactactcatattaagcagaaagaaaatttaaaccggcacccttgagtgtggaagacctaaataataggcaaggagtactatggcctacaataaggacaagaacaagcaattccagattccgaagtttagaaattaatccagagagactaatgaaataatatttatatgcaagtgaaaacattgttcaaccgatggaagccatcaaaaacaaaatcagcatagaaaatttaaatcatctcagtaaaacttaaaaccataaaagagactataggccaaactccaacatgtactcagaaaagcaattatatgcacaaattccttcaagcaacagatagtttccattc

SEQ ID NO: 13584 - DNA, 617 bp, Gossypium hirsutum
ttcagagccaggttcataatgcttctgggatgatgttgtgtctactgcttgttttctaattaatcatatgtcttcctctgttttgtttggtaattctcctttccatactctatttccaaataaacaattgtttcttatagcaccaaagatattcggttatacttgttttgttcggggtgttcgtccttaagttacaaaacttgatcctaagtccttataatgtatgttttggggatattcccatgtacaaaaaaggtatcgtagttattgtccttataatgtatgttttggagatattcccatgtacaaaaagggtatcgtagttattgtccaagtcttggtaagtatcttgtgtctgccaatgttagttttttggaacaaacaccattatcttcaagtactgtgagtcagggagaggatgatttgttaatctataatatcataccaaatttgggtccgcctccctctacaccaattaagcctcccatcaaacgcacctactcgtgtcgcccacatccgcttagttctgacttgattctcaagtctttagaatcatgtcctgatgaacaagtatctttgtcatcagatccgacgaccacaaatgatcttgatcttca

SEQ ID NO: 13585 - DNA, 600 bp, Gossypium hirsutum
tgctgtgactaacctcctccttgattataaagcttacataagttaagttgaaatttcacgtgttgctgttgaatttactaaatttagggatttcatgggagatctaactatcacggcttcactggtagagaaaataaattgcaagctttatgggatagcaatattatcactcctttgagtgaaaaaaattattaacaaatatatatttaaaaagggttattatgtaatttatctcttgaccttgtttaaaagtatatagttagtacttgaatattttagtacataattggtgtctgaccttgtatttcgtcatacacattgccttaatctgttaatagcgttaattttttaaaagttaacatgtaatttgccctctgaccttgtctaaaagtacctaattgattcttgaacttataacacccattattcgagtaaactcgagcaataaatgttacatttaacattgaacatgcatttacgatttcaaatacttttaaattagacttttaactatgatttcaaggccttactacacttttaggaacataattagactattaacaaggattaattgcgtatagaatttgtttcacccttcac

SEQ ID NO: 13586 - DNA, 658 bp, Gossypium hirsutum
ggtttgggcaactatagaaaggagatttgaaaaaagttgttttaggaggagtaattcgcagtcccttggagaatcggattgttggtttccatcgaaactcaaactttgcatgggagagggaatctttagatttatgaacttcctcctgtaggtgtagagaatgttcttttaggagcattgattatgatagagattgtgttgttagggtttgagctcctcttttcttaaaaaagtaattgaagctacacaaatcaaaatcaccaaggaaaaaggttacaatcaaaatcatgttcctcatacgagtacttgaaaaaggtttagaaaaatgcaagaagaaattacatggatcaaaatcataaagttggagtaggttcaatgaatttggaagaaaagagcaaaaataattgtatacctgctaatcaccaaactgcgtgtttagttactatggtggcatatgcacatctaattcaagcatcttagccccctaaaagcaacaacaaaaaaagaagagaaaaagagctcccaaatccttaccaccttgatttggttttcttgatagaaaacaaaaagggccgaattttcctttctttaatgatttctcaattatgctttcctccttggcatggaactagtgcttccatcaaacagtccttcaatg

SEQ ID NO: 13587 - DNA, 614 bp, Gossypium hirsutum
  misc_feature (56)..(57): n is a, c, g, or t
  misc_feature (59)..(60): n is a, c, g, or t
ggagagatcttctgtgatgcaatctgttccatacaaataggccatattttttcaanngnntggtttagccaccgaacagattcggaatccgaaagtacctaatgaaaaaggccaacaaagcattaaaggggcagactttacaagatcaaaattcaaaattaagaatctaaaacttcaaccagcctatatatactacacaaagagaataaaacaacataaaaagctgcaaagcatatgctttttcttgttttcataaaaaggttgattctaaacacttttctcaacatccaaaagactaaaattgactgcaaaaaaaagtaaccatttgaaccaaataaagaatgctaaaacatccattaaagaagaaaaaagaagatctgatacagaacaaaacaagaaaaactataagtatcagaattggaattacccaaaaggaaaaatacatccaaaatgattgataaataatacaataacaatcagcataaatcaatcttttttaagaacttaaaagtaaagcaaaaaaaaaaaaaaaaattttgaaaaccccccttccccggaattggtggcctttttcccccaactccaatttcttcccccacccccaccattaacga

SEQ ID NO: 13588 - DNA, 582 bp, Gossypium hirsutum
  misc_feature (20)..(20): n is a, c, g, or t
ccacatcgtatgtaacatcncacatcgtatgattcagcatattcaggcacgcataaaattgtctgaaatcttcataatataatacttaacttataggcttatcctcaaaaaccaacacaaagatgctgatctaggtctcatggactaaagtgtattatgttcgttttgaatttaggataacaattattatgtaagtactataacctcagacgcttacacacggattacttagtaggattctcagtataagacagacatgttggattctgattgctttcctttttcatgcaagactttcagaattcattagatgcattggcattataccctgctttctcaatttcataatcctattccgtcataaatcatcatgtcatgtcctcaatttcatgattgtattcaatgcaggtttctagatctataggcgatgtttatatgaaacacgcaaggtacaacagggaaccaattaacggaaaattcagacttcctgaaccaatgaacatgcctatattgagtgctaatccgactattatttctcatgatctccaaccaaatgattctttccttatatttgcatccgat

SEQ ID NO: 13589 - DNA, 679 bp, Gossypium hirsutum
cctcataggccaaagtaaattacagagaaactaaactagatttatgatgtcgaataaacttacttcatgtttgttgataaaaagttcaaaacgttcagtcagtcctggttttgacctatgccacttagccaaaggactcattatttcaggatggttgattatgaaagtaggattcacacacgtctcttctagaaaatgtccaacaagctgcaaacaaggaaaataaaaatgaaacttctattagaagatgggcatgtgtaggccccacgtctaaacggtgttcccagtgaaaggtgataatagacatgttctatccggttctgatggttaaaagccccaataatatcactgaaaaatcccattacaatacacacaaataagccaaaaacgtgttcacatttacaagaatcaaattggtcgtagatacaatcacaatgtaaacaaattaagggaagcagggactgagattatcattaaacaatgggttctgccaaggcctctgctgcactcttaaagtttaccatattaagttactattttcaaagcctttgaatgcagcaatttaactactgcattaaataaaatatattattataatagtaactcaataaacttagatatttacttggtatggattctagattgcctaagcaggtagccatctctcgactggagttaa

SEQ ID NO: 13590 - DNA, 542 bp, Gossypium hirsutum
gtttaagccgttcaagatggatgccctgtaatataattacacatcttgtcagtttcattttgtttcctagcaatttgcaaattagtgtttgacaattggatagtgatgtgttgaaaattaagctgccaatcatgtcgattcttgaccacaacttattaatgaagccaaattttcttgcgtccttcccaggacccaaacagaaatccccaatcatgagtgggcatattagggcgctcaaaccataaataaatcagccccattagccgacacaaaattacaacatctcgttggcaatgaaacccatggtataaatattcaacgcctccaccatgtcataaccccccaactacattaataataattgtagcgatttcagcattgaatatggacaaatccgtggaccatatgaaatgaaagggatgatcgtggttaaagttcttacaaatataataatctaagtttccatatttccactaaatctgactgttaatgacgaatgtataagctaagcaacggaaaaatagttcgggatttcttgtaat

SEQ ID NO: 13591 - DNA, 657 bp, Gossypium hirsutum
tgaagattatacctccaaacccttgttcaaaaatgtgttcgatgcagttagttaaggaaaaatgaagccagataacatagtttctaacaaaaatttgtgcaacaaaaggagagattttcatgtgatggaaaggttaaacaagacaaaagaggcttaagaatatctaagattagtgctatagattgttgtctgaatccaattatttgaagttaatagtaatgatgcttgtaaataattgattctattggggaactattgtaacttcaaaaagaaaaaggtctttaatatctttcacattcctgtttcaagcagcaaaaaggcatttacccctttgagggtttgggatcgggtctaagcagaaagcaagcacaaaaagggaaaatgaatcaagtggaaggaatattgatgaaaatgctggttcagctaatccgacgttggtaagggccctgctttggttgtttgtaattttaatggtggttagaggggaaattgttgattacaccacgtggttgtaggatgaggtcatgcattgtatatttgaaaaacatagatatagcagccagcctgcagtccaagggaaaagccattgaaatggatcccaaggattacatattccaaatcaaaccagaaatcctgcctcgtagatgatttaacaaa

SEQ ID NO: 13592 - DNA, 705 bp, Gossypium hirsutum
  misc_feature (680)..(686): n is a, c, g, or t
  misc_feature (688)..(701): n is a, c, g, or t
gaaatgcattgaatcggatcggccaagttgcttgaatgaccttaattgtgctgcttcgttcagccgaatgttcttgggagtttatgagctgcttagggcacatcacgggtcatgaagtatgaacaagctaagtagaatggtcacttgagtgtgaacaagcaaaaccgaatagcctttggtgtgaaaggaataatcggctggtgtgaaaccttttaatttgccttgggcagctaattggccatcttggagagttgaagagctcggctgaatagttacttgggagacaccaaggatcagcacaccttcattaatccttccatgcacctataccgtcctggggagagtgtacctgctccaattaaatcagcaaattaaattccttttggacatattaattcggctgcacaaacacattaaacccacaccataaattcggccaaacatatttaagccttgtaatagattaagtcacattaaaaactcacaattaattaagtacttaattagacataattaaaacacttaattaattatattgtccagattatgacaaattaattactaaaactatataactaatttaactaaagacacattaagtattttattccagcataataaacgcaagaattaaaagtagaaatgagctcaatcgagctaagttgagctgaacgaggggnnnnnnncnnnnnnnnnnnnnncttt

SEQ ID NO: 13593 - DNA, 663 bp, Gossypium hirsutum
tcatatgcggcaatacaaagagtcattaacttcagtgaaactaaatgagctccaaaacttccaaatccacaaccaatatcaagtacagtgcgtacctgcaatcaaagtaggagactaaataccatatagcgcagatagtttttacctcctcttgaagaccatacaatatcttctcatatttttaaacagaacaagctaaaatatatgggaaaaaagatattcctaaaataccaacgattcaaagctcaaggtatcccaaaatgcaaaaagctgtaagaatatcatgataaagtgaaataaaagacttactccggcttgaaacaattcagagtcgcttcccagtcccaacatctctgcaatctgacgagaataatctttgacaccatcaaagattaagccatcttcagggtggaaagcaatttgattctcttctagtaacatgattctagacaattttttaaataattatgaagataaattaaaactgttattgatcacataaagaacataagctgctaccagaaccagacactgattaattctaaaaggtaaagtttgtactaaaggagataagcctcacacttgctactttcacaaagcatctagaagcatttaatagatacctttttgtcacgcctccagacgaaaggattgggtatttaa

SEQ ID NO: 13594 - DNA, 563 bp, Gossypium hirsutum
  misc_feature (57)..(58): n is a, c, g, or t
  misc_feature (507)..(510): n is a, c, g, or t
  misc_feature (515)..(515): n is a, c, g, or t
  misc_feature (522)..(522): n is a, c, g, or t
  misc_feature (524)..(524): n is a, c, g, or t
  misc_feature (527)..(528): n is a, c, g, or t
  misc_feature (530)..(530): n is a, c, g, or t
  misc_feature (550)..(553): n is a, c, g, or t
caactcagttttttgctcctgaggaagtttatgttatagaagatgacaatgcagccnnccttaaatcttttgtccaaagacctcctgatttgattgaatctaaaagggaaagttcttcaatgtgagaaacagagaattcttctggatttcaagtaactcatttcatttacaccctttcatcgtgtcatctaattccttttttattccaggcccagtttcaacctcttggatgaagaactagaaggtatgggattatgctgtgattttcattagatatcctagcatcttttttgcctatttcacgcagtatttccgcctaaaaaaattctgtaggagagtttgctgctggaattgaaaatgatgattgtaaaatcatcactgagcaatcaatatttgaccatatacgagaaaaagccaagaactttcctctcttgactccaaacaatgcctattctccatcatctgaccaagagaaaagcaaaattcgtcaacatatattgcttgatnnnntaccngaatccnanggnntngaacagattgctgatgatcnnnnataactatct

SEQ ID NO: 13595 - DNA, 673 bp, Gossypium hirsutum
gtatacatcgggtgcgcaaaatataattaatcccatttttatttcactaatttcttatatgcctaaagtttctttatgtaatgctccttctctttataaaaataaataattaaaggttaatagctcaggctacatgttgtaagaaatgcacaatatatgaacatttgacaacattttcaataagcatatttcaatatagtactaccttataataacctttcatcactggcggtcccctgacctttataatgcccttggagccaagtgggaggatttcaccagtttcggaatctacaactttgaattctgtgagtggaattggatgcccaacagaaccaagaaccttcaaaagtcaaacatgagagatcgtcatatgataggacactctttcttaaggtcagcacaatttagaccaaagaaaagaaccgaataagattgaaaaaagatgaaaaaagggtaaaaagaaaacgtcgtaaaaataagacagtgaacccaataaaatacacttaatatcttagatttaaaacattcataatttaataattttaatttttatgtaattatctttacctctataagtagaaatttctataaataaatcaagtggagtcatttcataagtctctcatttttgtctaaggacatggttttcgatcttgctctatatgtcctg

SEQ ID NO: 13596 - DNA, 561 bp, Gossypium hirsutum
  misc_feature (542)..(546): n is a, c, g, or t
  misc_feature (549)..(551): n is a, c, g, or t
ctgaagcaacaaacagcaacattcaaacgacagcatgatatatgaagcacaatgttctgcttatttttttatctcaataaacacatttattagccaccattttttttctggtttgaagaatttgcatgttctgagtaacaagaatcgatgtatattagaactaaatgcagcagcaacgaaaactatcaacaaacagggggctataaaactagacgcatagcaaaatttctatagaaaaacaatccaaaaaacaatgttctatacgctcagaccaaggaaaacgatgaacagaaaaggtaacagacatttccagcaaaacctaatgtacatgcaagggaagaaaaatagtactataaagctatattactcaaacttgggggttagtgtcagacataggaacacatccaatatgggtgatattctaaattctccatatgcttagagagtccttggaaggtcatccatattggatgtgttcctatgtctgacactaacccccaagtttgagtagtatagcttttttgtagtatttttcttcctcnnnnnggnnntttaggtttt

SEQ ID NO: 13597 - DNA, 406 bp, Gossypium hirsutum
atataaagtgattaagaagatttagctttagaagtagaggatcaggaaagaacttgtatccaacattttgcaggcagtgggactaagctttttcaggcttaaccggcagcttctctatggaaccataattcatagtttacgacagaaacgatagacgatgaaaactactgagattccaggaaattcgggcttttatccgagcaatctcaaaacaaaatgcagttatcatttaccaatacaatgtggaaaccaggctagaaatgtaaggtctcatcaatatatccacaaaaatgtcatttgctaagcaatctatgtttatgattacttcaaggttgagcttgatccttgaaagaacaatcattgttcgtagctttactcacaaaacaacattaggtcaaattgaagg

SEQ ID NO: 13598 - DNA, 625 bp, Gossypium hirsutum
tttaccttgacaaagaccagagttttaccggaaatagtataaatattgagcaacctagggttaccaaaaaagccaccaaatagtcaaagcccttaaaggtctcctgcatgatgaaagtgccccaaatctgcaccagagagagagatttataagaacagtttgccacttaaaaccgtaacaacaaataagggggactgacattaaccatccattggatgtaacacatgcatcccgaaacttacagaaccatttcagaatatcatttttgcacatttagcaagagtctggacaagaaagctgactactcgagggcctggatcacagggatgtcatcattaaaactatcatacaagcgcgatatctaaaggttctttttcaaaaattttatattcaaatacaaatgctgagatgattaaaatttaccgtgcagtgcaacatcatagttttatacacttgtacaattttacctcatacatgttgtggttaggatattttatactgatataaggccgtacttatagactaaagaggggaaaatcaaaatattagaatatgtcagccaatcttgccatcttttatgcaatatggttcgtttcttggctatttcacaagggcataagggaaa

SEQ ID NO: 13599 - DNA, 484 bp, Gossypium hirsutum
ccctggatgataaagtcgaaaacatgaaaaaaatttcttacagtttatgttttaatagacacaatgacatccaggtctgatcatgttgctaccattatgatcctaaggagtcgcctaaaattaaatcactaacgaggtttgggtttgcatttttatcgaattgaatgaatagtgttcccccagccatgatgacaatgctacaaaatattcatgccatcatgtttgtgcatctttgatcatatacggaaaggaaacgagtctaaaattgggtgcaatgttaatagtttaactagaaataaagtagttctattgagatggattgccatttgttcagaagaaatagatatccgatactcaccctcaagtccaagcgacgtagtttgaaagtgatatgcagatatgattgattgattatttaactgccaagttctcttcttgaccttcaaaatatcaaaatatcttgtactcttcctctaatggattg

SEQ ID NO: 13600 - DNA, 504 bp, Gossypium hirsutum
aataaaagaaaaaacagtgattttgaaaaccataaaaaactaaagggcctaaattataaataacccatcaacttaaaatcaaacaaaacccccctttttaaaccctaaaaagaacattttctttctttctatgacattgcgccgtaatgttctccttctgccctcctctgctcctatggcgatgaaacaaaggagacgccacaccggtaagttctctttacttccttcctcgttttgtttatttgttgttttttagaagcaaaagaaaagaactaaaataaattttaaaaaaaaaacagtaaaggaacaaaaaaaaataaaaccaaatcctaccttcaaaaatatttttctgtatgttttctttttgatttcggtacaaaaaaaaaatggcccccggtaacaaagggaaatcgggttttataaacccaaaactcaaaaaaacggcccccctttccccttttccctttttccccttggaatttcccccaataattccaaggcggg

SEQ ID NO: 13601 - DNA, 579 bp, Gossypium hirsutum
tacatcatctcctttgaattgttcttagacaagacaatgtccatagtggtggcagttatatttttggttttcagtttgagaggattctatggcatggaaatggtatgcacttatgtaagagaaaataaacatataatataaattaagtcctctctctatatgtatatttcttggagagaaaggagcaaaagggagcatttgagggaggacagtttttctcttgaaaataaaaactacaagaagaaagttgcatccaccgcttgcaagtggcatatctggttccaggaccatgtaatccactaaaataatagataatatcaacagtatcaaaagaaaggtgttacttggagtacttgtgatactaaggacaacataccatttctcttgaaagatattgaaaagatacatttacaaattctatatgcccttgcagcttttgcagtgccattcctataacagagcaaaattcaatgtgatacaagttaaatgaaagaaatatgtgccattgaagaaaacttcttctgaaaggagtatttaattaataattaaagagaatgttcctcacaagattaaggttct

SEQ ID NO: 13602 - DNA, 685 bp, Gossypium hirsutum
ttcatgtttagtcttggttggaccatcctattttttctgtacataattcatgaagtactttcctccaattaaaaaattcttacaggaggcatctgtggcatttttggagcatttaagtatatgtgaatattttagttataatgcttacacacaccttgattatctgtcgatagttgtttaagactttaagtatagtttcttgagtacttggtcgtatgtcctgtctgtttttagtgtcacattcatggttatagtcttggcaacagtcagattggcacatatagacagtctactcctggtttttggttgtaaatctaatctttgttttttcatgtgttaaatgatgcctctatgattattattcttgtttaccatagatttcagtactatgattgtgagtttatgcaagttacgactttttcattttatgaagagagtataacttgcatggattttattttgaccgactagatcttttcataaatgtttgttttgtttttatctcttgtttgttgcacggtcatgcttgttctcatgcttgttctctttgttagtccatgataagtcataacctgtcatgaatgcatctgaatcactttcagcaaattaggtgtaagtgtactatgtaatgtgcaccataccttgagagtaaaagatgattacagggcttcggatctgacttatt

SEQ ID NO: 13603 - DNA, 642 bp, Gossypium hirsutum
aaggctcatttctcgagcactgtaatcgttgccaagattgggatcgatcagctctcggatttcgttcttctttagcaaaggtttagcctaggtggggaggaaaacaaattcaaggcataaataaaatacatgtgcatatgcatataagcgagtacttgagtatatggtgatgttgtgtgtgtgttttagtggcgttacgtacccacaatacaaggctttgctgagagtaatccagagctctacggccggtaacgagttccaacaacagtacaccaaaggcaaacacatcggttttttcgtcgactatgccgtgcatcaagtactcaggagctaggtagctgcaaaaagaatgcaataaaggagatcgatttaattattggaatcgataaccgataactgcaatgaaaagtttagtgtttaggtatacgaacccgaaagtgccttcgaacttggaaacgttgtggtgagtccagttttcgggtagccatttcgcgagtccgaagtcacaaatctgttgctttcttgtgttactatataacaatgtaagaaaatggaacgtttaaggatttggttttggagggtacctgagggtcgaagtcctttgtaagcaaaatatttgcagccttgatatctctatgtatg

SEQ ID NO: 13604 - DNA, 616 bp, Gossypium hirsutum
  misc_feature (608)..(610): n is a, c, g, or t
aatatggatttagctgtcaaagaagaaagatacactgatgcaggtaataataaaaaaataccatcttctgaccaaaaaacacaccaaaaggcaaaaaagagagaatattctgtttctattcaattataaatttattaaatgaagtagtcacaatgctattttttttcattcctttgttttgacatactgaagctcttacttactaacactagataaaattatatttatttaatttcttgcagcaaagttaagagagaaattaatgaagctacgcgatcatggccagtaactgtttactgatgtatccacggttgtacactcattggtggtggttggcttgcttgtgatcgaattctttttgcatttttatgttgttagttctggtgtttcagttcatgctcaaaatgctgtagtttgtagagcttgaggaaggtgcgaggctcgagactcattactctgagagtggaaccttcactgttttagttaagcctgaggagtcattcctcgaagtggaatggatgcataatcatgttttacaaactgtagtaaataatgtacatattcaatttagaaatgttgcctataagattaggggtaactaggacagnnnatatcc

SEQ ID NO: 13605 - DNA, 620 bp, Gossypium hirsutum
ctttcccattatattgcagactggcctgccctagtttgttttcacaagtgagtgacgaacttactgacttattatgttatagtgtacatggaacaaattttattttatttacaatacataaacttttttccatgattttaactttgtttattcttttgatgcatcattttgacaagcttatgagggatgtcactcgaagcttagattcgaacaaaaataagttaacctagggtggagttacaaaattttgttagagtgccgaaattaaattgtaacttttccaataataaaaatgcaatttcatcattttaatagtttatatctttataacttttaaaagattaaatcaaattattattatttttaggaggtcaaagtgtaattttacatttactaatttaaaattttaaaagatttaaatgaaaaattttccattttaagggatactggacttctgccattccctaaatacacccttgagttcacccagaatctaaccacattcaaacacgaatttgatgtgcattagctcaattatttgccaatagtatctttcatagtatgagttgatgagatacagtatatgaatatagtaatacccaggtacataaacatgcagg

SEQ ID NO: 13606 - DNA, 601 bp, Gossypium hirsutum
cggcccagattatgtgaatagttagctcaagaactcctttttttgcagcagataaacatcagtttgtctgttgttttaataactaattactgtaatttttccccctatgaattaagcacaacaagtttcccctttttttgattgacgtatatttatgggtttgatagtaattatttctgccggaatctgaaaactaattcctgctatttcttgctctatgatggataactttacgtgttttgctgatctatctttaattagtgttatgagcgcattactttttgttttgttctgttggttgcagaattgatataatatcaaacttccttaatttgtactaatttgaaaatttacttatgattcaagtttcgggaaatggatgctggtaattgcttttttagaaccatttgaaatgcatagatgaaccaattttctcccaacaccagatttgtcaaaatatcgaaaaccatgggcaaataaaatagtaataacagttttgatattattttttcttcatgccattggttaaggatggacattataaaaaagattcgctataattcctttctgagattttccgtttagcaatcaggatgggagc

SEQ ID NO: 13607 - DNA, 686 bp, Gossypium hirsutum
  misc_feature (635)..(639): n is a, c, g, or t
  misc_feature (650)..(650): n is a, c, g, or t
  misc_feature (659)..(665): n is a, c, g, or t
  misc_feature (674)..(674): n is a, c, g, or t
  misc_feature (676)..(680): n is a, c, g, or t
  misc_feature (682)..(682): n is a, c, g, or t
ttgtttagttcatggaatatttggatctagaaatattaaacttatcacagaattatctagtacgtgtcttgaagtttaattgtctgctcaccatgtctctgtactattgttattcttattcatgtaatttgttttgaagtccgtatggtgatgtttaagcttttagcttgtatacagtttgtatgtcactggtaaatagtgacaagcatgtttgtgaatgtttgaaaacacttcccatttcagtgttttgcatttaatattagcttgagcgaagatatactgatggtctctctatctctgtctctcttataattcctagtgatggagaaacttttatatcagccgatgatctacgtataaatctttggaacttggaaattagcaatcaaagtttcaatattgtcgatgtaaagcctgcaaacatggaggatctaactggtaagcctattctattttggtactttagtctgctgctttcacttcttaaagcaaaagactaaagtaccaaaatagaataggcttaccagttagatcctccatgtttgcaggctttacattgacaatattgaaactttgattgctaatttcaagttcaaagatttatacgtagatcatcgctgatataaaagtttctnnnnntaggaattatnagagagacnnnnnnngagagaccntnnnnntntctt

SEQ ID NO: 13608 - DNA, 590 bp, Gossypium hirsutum
tgtactagcgagagctcgaatcgtttactggttaaatatataagttggtttatgttttaattattttttgaatgtaaatttgttttgggttttgctctttggtttttgcactgttgttgggttttggtattttaacattaaactgtaaaattgtatgatttattaaactaaaaatttggttttcaaaattaaaactctgaaaatttctgttgcaaagattaggtaatcacttaagtatttttctgtaaataatttagtgtttaacaaatgtttgccttagttttggaaatgatttgctaatattataatttttaaaacacacgatttaaaattcaaactctaggtttgagataagtgatttcaagcttaagttttactaaatatttgtgagagttttttcaagttttatgttttcgacacgcacactaaatttgactaaatcgaaaatttttaaatgagttaatataattcttcaagatccgattataacgttaaagtcaaatttagggtgttacaacttgattgtccaagaaattctgatgaagtgaaacagtagaaaatggagccttcgtaaaactgggatcaacctg

SEQ ID NO: 13609 - DNA, 382 bp, Gossypium hirsutum
tgacttctttttgtgtgtgtgtgtggataaagtgaatgacattcagacatttaaaaagaaaatcagattttattgtcacgccttgtctcttatcctcgcttcaaacaaatgtaactgtgttcttttgttacctttttcatggcatgagcgacacaattgaacaaaaggaaaatcaagttggttattagaagttcatgatacgatttggtaaacagcaatgcaaatacatagaagaatttggccttagattttattggtttcatatacacaacaaattaacaaagaaaataataaatattacacggatgcgctcagacaatccaaagcaatttattatatacatttaattctgtcagtttcctaactacaatctggtggcaaa

SEQ ID NO: 13610 - DNA, 663 bp, Gossypium hirsutum
gtttcagaaagaaatgaaagggaacttatttttgtttagacgttagaaatttaaaaaacagtagtgagtggtggctccacaattgggaagtatccttcattttttttctacatgaaattaatgtgaagtgtagaaagtggtggcaaactgcatcaaatagttgcttaataaacgttcagcattgaattaccataatttcctagagggaaagtggaaaaagataaatccacttctaatgtttcatgtatatcatctagcttattcattggggtaatataactttcttcacgagggattcatctaaaaatcacatcgaagaattcttctagtttattcattgcggcaatataacttttttcatgggtgattcatccaaaaatcacaccaaaaaatcctttcttactgacgtcgatgtaaaaattttatttcttatatttttatataattttaaatatccaattgttaagggtaaattcaaaaaaaatcaaaataaaaaaattaaattataaaattttaagaaaccaaagtacaatttcattatatgttaatttgtaatctaaaagttgcatagcaagtagcaaccgttgaattatcagtcgtacttagtctctgggggcaatgcgactctgtttacaacgcttccattacgttctcaatcctgaa

SEQ ID NO: 13611 - DNA, 620 bp, Gossypium hirsutum
ccgttccgtaggcaaggaaaagggaatattggtccagattcaaagtaaattattgcttcacttcctttatttgttctttttaaattttttttaccttttttcaccctttaattcagtttatttaataaaaaaaaagtttgataacaacattttctatggctataagcagtggaattaggcacaaaaattacgtaaattctgatgaatttgttcttccatgatctacatgtttataacaagtgtgaaacttttgatagtgcaaattgaatttgttcaggttggttagtgtttaaacttgtcttctctgtagctaccatgttgtctttggttttggtctcataattacaaaattatttactctttggctttcaatgcaagaaatatagtcttttattttctggttgatgtttttaacagggcacaggtagttggatggccaccaattcggtctttccgaaagaatacgttggctgctcaccctccgaagaatgatgacggtgatggtaatgcagaggccaagttaggatcaggatgcctgtatgtcaaagttagtatggatggtgctccatacctgaggaaagttgatctcaaaatctatggcagctacaaagatctcacct

SEQ ID NO: 13612 - DNA, 642 bp, Gossypium hirsutum
ctttaaaaataaaaatgaaaataaaaactatattttgctttgtctaattgagaaaaaatatgaataagaaaaaaactgatatttacaaaagaaattataagttgctttgttttgattagattaaaccaaaagtctattgtaagttgggtttatagctcaatttaatatttaataaaaatataatatttttaatatttaatacttaatgaataaaaatatatattttctgaatttaacttgtgcttggtataaggcttttagtatcgcccgagtggttttccgattgtcagtctgacgccggatcggatctccatttcttttctccttttttatttcacgcatcttttttctattcagtttataaatccattttatgagtatcttatttttttcatgggttgtgatggacaaatatcaatatttactcatgttgaacctccaccgttcatcagcaattccttttaaagagtgaattggccatagattcttcatttgtttttactctttaaaggtatttcgaaataataaagatttcacaagttaatttagactttcgttgttttaagtcttatgtgttttgtttttctttgtttactaaatcttcctttgatgaaagtttttggtctgtcctggataagtttg

SEQ ID NO: 13613 - DNA, 531 bp, Gossypium hirsutum
attatgggattcagttttcatcaatattcccctaactaaaatctgggatttagctcgaaataatatctttgtctgtccataattcaaattcggttaagttaggtataaagtttctcaaatggaaatatcaactttcatttctaaattagttaaggccaacacacatggttgaaatcataaataatgcaccacttcattgcaattagtcctaccatattacaaatcaggaatccgtgtaagaattcgctaaagaatgaatttgcagaaaacaatctgggaatattcagattaatagatcaattttctctcaagctgtaattcttctgtatatacaaaggcctctcttggtctctcatggagggcctaaaagtgaatcagaaattgttgttctaatggttagttacatctcagttttcacttggcatgcaccacatataatttcatcaaaatcttgttcaactatgcttactttgacagctttgtggtggattctggccaaatcccatttgaacaatgctttggaggtcaaca

SEQ ID NO: 13614 - DNA, 689 bp, Gossypium hirsutum
ttcttcctcacacgaaaagctgaaagcaaaatcctcaaacatgaggattcataaaagaaaacttcatgaccaccaagttcagaacaacagtccgatgaagaaacagaaaggtgtagtaatcgacgagttaccaatctctaaccccattactgatgtgctacccagcggttcatctaaccctttgttttgcagactttgcggtgatcaaaaccctacttcgaatatcttcaacgagacgcattgcagtcatcggttctgctccgattgcattcgacgtcacatcgtaacgaaattgaaagacgaaaacacgatcgcggttggttgtccggaacccaattgtgatacctcgataacgcctgaacaatgggaatcgatattaccgggagaagtgatttatagatgggatgatgcgttgctttactctgtaatattgccggttctggtatttgaatgcccttacgaggattgtaaagctaagttaatagatgatgtgatgggagggacagaatgtgagtgccctaattgtctgactataatttgtggcgaatgtagggatttcaagcatgaaggtatgggatgtgagaaatttaaggaatttgtgaattgttgaagcttttgatacgggggaatttgcagtgaattttgctggaaaagactgataaaagttgaatgatggtgagttttcttcg

SEQ ID NO: 13615 - DNA, 657 bp, Gossypium hirsutum
tggatatacacgtaggcaccaatcatctatgtgtttcattttggtgccttttagttggtgtgttttcaccttcaaacctagaaaactttctgaacaattttgttcactcacttcggtctgtatattatataattcaatgatgcaaatataagacagtcatctcaatttatttgatctgcagacctttggttggactcctcaagaagctaaaatgcacatggttactgattacttcacccatgcagaggtgagtatttattagttaatacaacattgcttaacacaacattataaacatcatcataagaaggaaataaaaggaaaatccataactcaaaccccattgaattttatgtttagttcttaatagtctgtagttggcttttctccccttcagaatcatctatcagaatctttaattagtgacattcttggctagttagaagcttacctttattctgattgcagtggatggttattgatgatgtgcttgggcctaatcctcgacatctatttgaggtttatgtgcttaaacaaagcaattattaccagaagtaaggatatttcttgttcgatttgttgtattcttgtctcatatcttatattatatgcttaaatgattagagtgagtggttatggtaatccagtggtgtttgg

SEQ ID NO: 13616 - DNA, 516 bp, Gossypium hirsutum
  misc_feature (64)..(67): n is a, c, g, or t
  misc_feature (69)..(69): n is a, c, g, or t
tcaatagggcgcaagctagggacattactatatgaatgagacttcatccttatcacaacctaannnntnaagatgctcctctagtcccgagcttggtaaataacgccgtaggaaattcaaactttcttccggcctttaagtgatagggggaagtcactcttgcgttctctctcttgggtgggtcagtctcgctctctcttgtcggtaagtatatctgtcgtggtattgctgtcgtgccgcgccgttccagtagtgtttgtgaattaatagttttgaaaaaaaaaaaaaaggggaaaaaagggaaaaaaaaaccggacccaaaaagaggggtttccccgggcccaaaaaaaaaaaaaggggggggggggggtttttctaaaaaaaaaaaaaaaaaaaaagggggggggggaaaaaaggggaaaaaataggtttaaaccaccccaaaaaggttaaaacgcttttaccggaaaaaaaggtttgggggcccccccccctttccccaaaaaaaaaaaaaaa

SEQ ID NO: 13617 - DNA, 660 bp, Gossypium hirsutum
tgacgacaccgtcctcctaccctcctccgccgccgccgccatcttacagctaccgttgcaacgaaaacacggcaagaacttcacatctccacagccatcacaaacctcccctgcttttttcttcggcagcccattaattaaatccccaaaccaaccttcgtccacgatcttcatcacttgttcggctcccccaatgtaccttcccttaataaaaacctgaggcggcgtcgtttggttcgcccctttcatcaatttccgtaactcttctttgaaccctcgatccatcgaaatgtcccgttcgcatataacaaccccgtaactctcaatcgctgatctaaccgcattgcagtcttcaaacgtcttacggataccccttaacgtcgtcgtataaatcaccactctgttttctccgttcggtgggcatatattctcaaacttgtccagcggcgatggtttcgaaacggcgtcgcttccagaatcgaatttgtgtagcggcgaaaaaggagttttcgcgacggtgccgtttttgcttaaattaggatcggcgttttccttttcgggtaacaccgtgattgggaaacggaagctgtcagcctggaatttatccagcagcgaagatcgggaaaccggcggtttcgaaacgctgccgcttctgccaac

SEQ ID NO: 13618 - DNA, 676 bp, Gossypium hirsutum
ccagtgatgaagtccaccaaactttcccacaggtttttccaaatttttttaagagactcaaagaaaccatccacgccagtctttggtggttgaaaaggagtaatctgaagcaaattcacagttttaagggatttactaattttacacatcaagatcaccgagtaatattttgttcacagcagtaaatagcgtttatggttgacattgacaacgcacataattaatttaaagttctcctcaattgttaataactatgtacaagtgttgggtacggataattatctaacatgtacgtattcaatttttttcctaaacttttctatgtatttgaactttgaagggtaaactttggaggactatattgccatttgtggtccaaaaatgtgtcacacacgtacttcaagaaaattaaatagttggtgcaacatagttttagactatgttactcggactcgggtgtaggtatcgcatatgggtatggttagtttttctaagtttttcatgtatttgaatgatccttggagatcatatcctcctatctttgtgtcgaacacaagtggcagaaacaggtacttcataaaaaataaagaaaccgagcaacataggttttagaactttatattcatatccctttgatacctaacaaacatttgtgccaggtttctatctcaatgag

SEQ ID NO: 13619 - DNA, 617 bp, Gossypium hirsutum
  misc_feature (58)..(58): n is a, c, g, or t
tttaggtagcaactcctgaaccaaaagaaaagcaaaatgaagtgtaaaaagcaaattntgaataccgaatctataacaaagtttgagaatgcacatcacaaaacatgttttaaaatttttttttgaaaaacatggcttgtttacaatgaaaagttgaaaataacagaagttgccagttagtgattttcattgatatgatacacatcaaagtggtatcaactactttattgcattagcagccaaccaaatcaatgagcgtaaggcagaaaagattacaataaatagataatacagactatgaactaggacaccatgcttgccccaggacatggaatccttttagcattcttaaaaggaattttgcttgtcaaagcaaataaaattataaaagaacttaagaattgacagccaggactgttaaacagccacttcgacaataatctactcgattcaatccctatataagattcttaagtagtttcttcccctagatgaccaaagaatgaaagtctctttttctctttattttaagatttgtagctccgcttggaatgaagaatggaaagaagtatggaaaatttgttaatctaatggttaagctacaaagtaggaaagtg

SEQ ID NO: 13620 - DNA, 679 bp, Gossypium hirsutum
attatgtgattctcgtgttgggatttagtgtcctagtgtagtaatatcattaaatgtacttgtactttttcaaacatattagtttaataaaatttcatcgtttacatgcaaatattagctcactacttatctaacgtttaactaatattaagttgtattatgtaattggattataatgccagaagacaacttatattaataggcaatctaaatggtttgtagtctaatcaaaattgatcaagttgattaaaagaatgttatgttgtctattaagctcaattaggaagataccttgtaaaatagatgtgattgtctagaagatagagatacagatgtgattgtctagactagcagtacattgggcaggaccctagtgtcacgggccgcagttcaaagcccgtgaccatcgcaccagatgcatccaatggaggtctattgctcagatggggatcatttggcccacgagaactggcccgattcaaagagctattagagaagcctgtcagattaaagcctggttggcccgataatgaagacatgacaacttaggctaatatggtaactaatcttagaagatagagggaatcatatattgtaaagattagattagatttgatatggcatatcttgtatatccctaaaataaagggatatgactaatctcgtccgtcgatgtaaa

SEQ ID NO: 13621 - DNA, 416 bp, Gossypium hirsutum
tttgtgataggatctccgacattgctgcagatattccaccagtgtcggaatttgagtccccaaagttgtatattgctcgaaactcacatgaaaatgaaccaccattgctttccacagttctccatcgttgtgaaaatccccaaaacaagatcccaaatacataaaacagtttccaggagaaccccatcatctaccttggctagaagctaaaggccctttcaagagttttaagataatttctttcattgcctacaataataatatataagtttgaagagtgaagtgaggtctttctgaagatcaagtttttgggctcttgcatgattagagagggttataaatcatcattttcattgcatgggaagcatcggtgtgcactttacttttgatattgatgggtatgattagagatggtc

SEQ ID NO: 13622 - DNA, 400 bp, Gossypium hirsutum
caagtatttggccaaaagggggaaaaacactaatacacaagtaaagcatcttgaggaattaattagtagattaaaagaataataaacttaaccaaaaaaactcatctagcagcaagacaggattcaggaaccaaatgcatacttgtctttcttgtctagtggtctgaatgatgaaggagaagaaggcaatggcagtatctgagaagaagttgaagggtactgtggcaaatactggagtggttcccctacaatgaattttaagaaagacccttctattatctcatctgctaaaattgctgctttaacaccagaatcttgaagactacctccatttctatgcacccttttctcagcttcaagcaccatcaatttcctcaaaagtttctcttctgcatccctc

SEQ ID NO: 13623 - DNA, 625 bp, Gossypium hirsutum
tgttaacgaagacctgggaaatagaaagactagcgaaccaccaaatctgaacagaatgagtacattgaaggaagacaggctctagatcctcggtatcaccacactggacacaatcgggagatatagacaaccccttatccaacaccgagccttgcaaggaacgaaattatgcaaaagacgctctttgactttcggagctactggtaggcgaattgaagtccaaggagttaaagccaaacttgagcctaggctttttttattaaaccgtaactagactcatggacactattccagtatttgtaatataatttaccagtattacttttcaactctaaaaatctaagagtaaatgtttaagtaatagtaaataaaattttaaaagaataatcaaaatgagtttaaaaaatattaataatttaaaatattccaattaattcaatcatttatttaaatttattcaattgaaatttaaagaaggtgtgcacttgggaggcatgaaagcagtaaatgacctattgccatgcagaggcagtgtgactcagtggcatttaatgtgaagatgctatgatatagaaaagataatgtattgcttacctttggacttcaataatggaaattgttatct

SEQ ID NO: 13624 - DNA, 613 bp, Gossypium hirsutum
  misc_feature (59)..(60): n is a, c, g, or t
  misc_feature (62)..(62): n is a, c, g, or t
ttgataattagagccgccaaacttaaaaaattattaaaaacggaaaacgaaaatgatgnngnttttgtccttatattaaggtttttttaactggttggaatattcattttattttgtataaatttaaaaattataattatctcagtcgtattaatttctaaaattttcatttaattttatatcaaattttaaaattataaaataaaattattttcaaaaattgatgatcaaaatcttgcttcagataaaatcaattcagtatgatttggtttgttttgatttaacttttttatttttaaataatattataagataaccctaatatttttaaaaaaattgatccggaacagtagcacaagcatgagcggcggaacccgacaacatcttactgcaacgtgtctcatcactccctttgattgggccacgtttcgagttcacacttatttgtggagtcgcgtctggtgactttaatgattgcagaagtcgaaaataccctccttttgcgtacggaaagggcacccttattatttcacacacacacaaaaaaaaagggggaaaggggccccttaaccaatgggaagccaactaaaagggaagggaaggtggtactgga

SEQ ID NO: 13625 - DNA, 377 bp, Gossypium hirsutum
gaaaggaccaattataccaacatactcctgagccaatgatgctataaatatcaacaaaacaacacactgtgaatgttagagaaagaagccgtaagtcttacaagaaaagcaccaagaacaccacaggtttccagatccttttttgtgttttccttagctagttcaagaaaatcctccattagtcgtgttgactgagaaaaaaaatgaaatggatatttttaggtaaccttaaagatattgaataccctgttaattatatatatatatatattttttgggggggggttgttctagaaaacctttaaaggggggtataagaaaaggacagcaaaattgtataattaaagtgtgattactatatgaacattctgaagcac

SEQ ID NO: 13626 - DNA, 501 bp, Gossypium hirsutum
cgtcagtgtcatctttagcatttttattgcgaatactacaaacaacataatcaccgatctgcaatatttaagaagaaacaattagtaatctcaaccctagatgaacaaaacatactatttaggaaaaatcagggttagggcctacttgtttgtcttcctcgtcaacaagcgaaaactcatgcatgatccaatgcccttttacgccttcgttggaacccttcacttcgtaaacaaaaagtttccgattcccgattttcatcttctcatacatgataggatcggttttctgacctttccatgtcccacacccagctactcgatcaatatttttgcctttaccctttttcttcaacttggtgaaaacataaaaagtttcggttgaagtctcaatgaaaacattccatggctctttatcttggttgccatagatttcgcattcggagataatattgtagggtaacgggtctccgttcactttcttccagaggtaatcttgaagaa

SEQ ID NO: 13627 - DNA, 544 bp, Gossypium hirsutum
ttgtataagagttcaggagagagagagaaagaaaatttgaagctgaccagccgacttctgaaatgtgacgatcttctccacaaatccatgaggtgagaaaacctggtgtagcacctccacagtaataggataaagcatatgatggattgtgaccaggaggattcgattcggctgtgcatccaaagtgtgcccaatagcagaaccgcaaagagacagaagagagaggaatataaatggagaagcatagatagagaagaaatgagaagagaataataaagaagcacagataaagagaagattaaatgaataaagaaacaaaccctgaatatgcagtaaaaaggcctttaaaacactgaaattggaaggactataaaaacctaggaaactcagagaggaggaaaggaaagccaaaatagatttgttctagttacttcatatgtatgaacttgaggttacttgtgcaacaaagacgtttattacgtagatattattcaccctatagttggatagtataatgcatagagctaacaggacaaagggattg

SEQ ID NO: 13628 - DNA, 561 bp, Gossypium hirsutum
acaaaaccaaagcaactataaaatagtaacttaaaaaaaatataaacacaccggaaccccgcagtattcagtgagaccccttccagtacgaccaagtacaccaaatgagttggtctcatccagtaagacacggaagcgatacttctctttcaacttgatgatcttgtccaaaggagctatttgacccgaattctacatatttaaccaacaaaatgttattagatatggtgagactacaattaggagaatcagtaagaaacgaccaatacaaggtatcatcaactttgaaccattggacctcacagttttttgctcaaaagggctctccaacattttttccaagtctcctcatatgtaccactattttacaaacatgcagcagggtaaaacaaatagtaaacaattaacaaatttccgtaaagaatgattccctaagaagccaaagaatgataattgctttttggcaaataagtaattctaagcaatttcgttaagaaaaaatatatactctctgcagcatcactattgctttcttatagcactcacccatcctatttagtt

SEQ ID NO: 13629 - DNA, 657 bp, Gossypium hirsutum
tgctcatttaatacccacagttcccaacaaatggtggactaatttgatttccaagttttaaagtaaaaaaagaaaaagaaaaagaagggaaaataatacctcattaattttaattgctttaaaaggaaactagatcaaaaacttagggtctagattcttgatcgtaaaatactatctatgtatctctaatgtagaccataatctaagactagttcatgtcataacctcaaaagttgaagggctcaggtccctaatgtggtccccagcgtagacagtaatatagaaaattttattttatttttcttgtttgaaaaaagcgagggatctgttagtgcgccaccacttgacacatcgcacatgtgaaaaataaataaacaaaaacaagggagagccacgtgaaacccagtcagataatgatcactccaatgaatgacgtggcgaattcccattggttatattcctttttatcgtacggtcatctgaatgacgtgctttccctaaccttgtacggacccacaggtatagggaaaaagagagaaaataaaaaataaaacctatttattaatcgtgcgggtgtccaatattttcatgcaaccgacagagatgtcccgtgtcttttacttttacctcacatgttagttgttgcttctttcggtg

SEQ ID NO: 13630 - DNA, 443 bp, Gossypium hirsutum
cgtcaagttaacgctccctaatggctaattatgttacggaagtttaactgtcaaaattcctaatcctcaattaattttttcaaaatatataataaattgatttaattcgataattattaaatattaaaaaaataatttaatcgccaatataattaaaatattttaaaataaatcggagttgaattataaatattttagaagttaaaatattattatgtattaatttatgattacattatttttgaaggggtttaatagaatatttttatttttgtgactaaagtacaatttgttcatatattaatttgttctcgatcaaatcagtcggtctgatcttaaaaatattgattttggttatcggttcgttcaattcaattgaataagttattagaaaattcaaaaagaatttgggttagacaattttttgttagtccgcatcgatg

SEQ ID NO: 13631 - DNA, 400 bp, Gossypium hirsutum
cgggaattctccttggtttcatatttagttgataattttgtggacaggtaaatgttggtttggagtgtggtatgggagtggaagattatgattgatggcaggaaggagatattcttgaggccttcaacattgttcaaaagaagcgaacacttgaagaggcatctgcttcaatggcagccgcactggaaggagtaggagttgagttgtagaatggcactggcttcaaaactcagatcatttggttttcttgatggaatcaaaattttcatgaaaggggcaaaccaccatgtagtgtgtctactgctgctttggccattgctcaatgtgcattgatataagagattttgcctcatgcaacttattttggaatgcagcatgttgaggtttgtagacatgcaga

SEQ ID NO: 13632 - DNA, 597 bp, Gossypium hirsutum
aacatacagcatgctcggaaggccatcgaagaggccgctcaaaagggtgcccagcttgttgtcttgcctgtgagttttattcttgtctatgtctcaaggtttctcctttctcatgtacgcatgagggttttcgttaggtaacaaattgtgcataattaagctttgtgctattggattcgaggttgaaaatttagaagcttggagggtcttagaaatttgagcataccagataagctaaagcctaattctttttttcccatgatttttggtgaaatcagcttgacgagccaaatatatggtggaatattaaaccagaaaatggttgttttggtgttccccaattacatataatagattttgctattaacattttaaggcccgtccttcttttctgtttttctgtttcaggaaatatggaacagcccatattcaaatgacagttttccagtttatgctgaagatatagatgcaggtcatgatgcatctccttcaacagctatgctgtctgaagtttctagtcgtctgaagatcacggtagttggtggctctattcctgaacgctgtggggataaattgtataatacttgatgtgtcttg

SEQ ID NO: 13633 - DNA, 580 bp, Gossypium hirsutum
aacaagtcaagctaatttgttattaaaatgagtttatcaattgaattggattaattttaggttggttttatgtacaatattaacgtgatgcatagttgctactgaattttaaactttattaaaaaatgcttatatttgcaaatgaataacaaaaatttatataagataaattatattattttaaaaaaaatttaaaaaatatttaaaatttaagtatatttctttatgaccattatatatacattcttgataattttttaaatatatatatttttaaaggcttaatatttaaattatactataatatttaaaattttaaaaaatgataaatttgaaaatagatgtgattaatttccaactttaaatattaaaattcgataatattttaaatggggttaataattttacttaaacccacttttaataccaaatgtttttgtttaaattctgttatgggccttggggctttgacgtcaaaagtggccctactaactatcctttacatggagcccctaaacctttaagctccaacattaacaccagaagcagcgagccctccgcaccagaccctgaaagaaaa

SEQ ID NO: 13634 - DNA, 589 bp, Gossypium hirsutum
ggaagtgtaaaaataagacttgaacacaggggccacaacataataaaacaaaatgcagtcatagatgactttgagcagcaaggggaaaaagaaatcaatgaataaattccatgctacctccagacaagttctactaaagaaggaaattgaaatgaaaacctaactgaacccaagcattatgggaccttgttccttgacctctataagatgtctcaagcgcgaatctaacagtttattacacatataatatgccgtataatttgcaagtcatgctatatacgtcttgattcattacagacaacttatacatcttaacatttcaagataagaaaccacaaagtaaagttcctcaccaatatcttccaaggtcgaaggttctatctctgtattcctattattatctccattggatttacctttaatcccatcatccttcttataactgtttggtctaagatcaggaccaatatcccttacgcaaattgcagtataaagcctagaggcttccttcaaggcctaaaaaaggattacaggtttttactaattatatactaaaaataaatgcctcttatatcctaatgcataagca

SEQ ID NO: 13635 - DNA, 697 bp, Gossypium hirsutum
tggctgtcccctaatagcccaaataatttgggttttttttttttaattttagattatttttaagtttaagtaaattattaatgaaagaaatgtgcaatttttaaataatttttatccttttatcttttctctgattgttagtgtaattatataaaaacaatttattaaatacattggtattaaaatgaagtagtaaaaaaattggatggaattactattttagttagaggtgttcaaacggttagtcgattgattaatcgaaccgaattaatattaaccaaattaatcaaactttttaattctttaaccgttaactgaatcaaaattttttcaaaaaaaattaactgaactgaaatatttcaattaattcagtcggttaaccgaattgaccaaaatttatatgttttttttttgttaaaacgagtataaattatattttaaaaaataaattgatgctgttcatttgaccaaactaactgaattagtaattgcctaatacatataatatataatattatttattaagtttggttaatttagttaattactcgatttcaaactgaattaaccgttaatcgaaattctaaaaacctttaaccaatttccgattgaactaaatcaattaacccgactgattaatcaaattaaatcaatttaatcaattaattgaattttaacccaccccctctaaattcag

SEQ ID NO: 13636 - DNA, 510 bp, Gossypium hirsutum
ttgatttgggacttggttttgaggtatgtcctttgtaaataactccaataattggaatagagaagtaaataccaatgatatcacccaggcattgttgttttagtaaccaatattctggatatttatagaccatttaaacattctttaggattaatattacaaatagtttactaactaataatcatggggtatcaatttgcatcttgcagatttgtcctggatatgaaaatccttctgagtttctaaattacaaattaatgaatataatttgttttttctatacttgattcacattacactgtcaaactgatggaattagttatttgatctagttacatttaactcttttctttctgtaaagggctgaaatcatttctgttcttgcatcatcattgttcctttccattttctaagttccattttatgcaatggaacatttgagtttgtttgacatctacaatgttgactcatttcaacttggcagaacttcaagcatattatgaaggagtt

SEQ ID NO: 13637 - DNA, 657 bp, Gossypium hirsutum
ttctattttgcccttgagctatgctgaaggtgtgttttgcatttgctcttatctttttcaccagtgtctggactcagagattttgcgggttaaaaatctttgcaatcaagcaagcaagaagggggacacgaaagaatatcctttgatgcttgatatgagactgaccgttaagcttaacccccctcttttcctcctcatatacccttatatcctctactatcacgacattctaacataagccaccaacatgcaactaactataaacctaactgttgctttgagcctatcatgctcattatcctttatttgggatcatattctcagccatatcagagatgcaaagtccttttgtaaatttttttcctatactttttcgatctctcgttgcagacctttgtccgatgatatcaatttagcacatctctatgtttggttgaatattggtgctacaccctagctattgcctaatgcatttatttcaaggctaagagtcttgtgactaaacaatgtcagagatgaccagcaacaaatagggcttagccttttcgactccaatcttgtcatttaccatctcagcgcattgcttctctttatggcagtgattttttgttagacattttgtgttttttgctagttgctgcattgtaccctgaagtg

SEQ ID NO: 13638 - DNA, 452 bp, Gossypium hirsutum
atagctaggtctaggttgttaaagggttaggtcaaggtcaaaagctggggcagtggaagttttcctttctgggagttctgttccattcctaccagtaatctataggtatttctctgaaagagctaatgataatagatagatttatcttaagattctagagaataaatagctttgttccccttcgcctatctaatcttctttctctacaggagactactctactagtatacttattaagctggggcggtatctttttagtcagtttcaggccaggcccttgcttatggataagccgtagttgtccctcaaaatgcggaaacctatacagtttgagtgctgagccctgtgctttgctgtccattttcctcggaaagaaaaaggcttaattaagtagggatcccctctagttcttaccctccaggtaaaaagaattagaggggatccctacttaa

SEQ ID NO: 13639 - DNA, 420 bp, Gossypium hirsutum
ctctcttttttcttactactgtttcaacccctcccactttttttcttcccattctctctctctaacattatattttgtctgtgttttttttatttttcttaaaaaaaaaactccttttagtgagagttcaaatattttgtgtgttttcgagactcatcttcttcttcaaaatggtttgcaattcagtttctcttcacatttgcgtggttggtttttgcaaaagaccagcctctttgtgaatgctaccaatactatttacaggctctcatattcttgagatatagcctttctcaaagaccttctgtttttcagtgaaatcgagcttgcttgatattgggatcaaaaattaaaaaattttgtcatcaaagttggatcttttagttcaaattttgggacccattttgttttcatttcatttca

SEQ ID NO: 13640 - DNA, 645 bp, Gossypium hirsutum
tgtaggcacatcagggcttaggggatgcccaaagctagcctcactctcctatctctttacctttctaccacggaatggatcaaaccttagcgtacgatctggatatccgacagcagctccctcggtgggagccagagtcgagtgccggccgcagagaggtcacaccatggatagttttcctcttccgcgggattctgcctttactgctcgttccggaaccgtcgagtagattcaatgcagtccggtcagaggaaatgctcgaactggccagtaaatacgagtatcggattggacggtcgaacaatgaacaaccattcttgtcttccccttcttcctcaggaaattactcatctcgggactatgaatctatcttgatgtccaaagtcttatggccgacggatgtggattgattataaaaaccaacaggaaagtcttatgacgatcccttgctctaggttgccctagaagcaaaccaaaggaactccgtaccggagacccctctaagtaaagtaagaggatgagttaacttattgtccgcaaggataaaacccatataggacggacctttctttgcaacctcatcgtaaagacgccagagcaatccaaatcggattaactcagggtcctcactcttaaccttccagt

SEQ ID NO: 13641 - DNA, 505 bp, Gossypium hirsutum
acaaaccaacaccaacacatttgcatttcaatgccattcattgggtttttattgcttacttataattgctactacaaaacagacttaaacaagagagattataaatacaggaactcagtaagcccaagaccaaaaggcatgatcatcaagagggaatccaaaattacaggaacctgcaggcgggtcggagtaatcgatgtcttggagtttagggaagacgcatgaaggaagatgtaagaggcccttgctcaagttgtcttcctcatcttgtgataaatcagactggtctggttcaaatggataagatgaaccagcaccctccaagagtactgaagaatgaaccccttcagtgtaatcgcttttggcagacaccactggcacaaccttagactcttccccctcggcagcctctgatggtagctcttgcgacgatgttttcgcatcaggaagctccggctctcccttctctttcccttccaaaagtaacttgtccgtgacctgaaca

SEQ ID NO: 13642 - DNA, 480 bp, Gossypium hirsutum
ctatgccgtggaagaacatttcatgcaccctgtgaaattgcattttagttcaactttgtgacgtagccacacattctttttgatttgtgcagtgtgtttgggttgatgatgtaagatccattgtacggcatggatgtaattcgatggagtggatggagagtgggtgaaaaatgcaaaatgttggatttaaggatttttgcaataatgttcacccttgtgactgttatattgttgtattcatatatcattgtcgagtcatatggaatttgatgtttatggtgcattaattcattcgtgagtgggattgccgtacttatattatttaagcttgaattagttattaagaaaatgacattttccatgagcatgatgctgcttgtatgagcaattattaactaatttcagcaacttagaaagaaaaaaaaagtgaatgaaaaaaccaataacttcttttcaagggtgggaatctcaagatcaaat

SEQ ID NO: 13643 - DNA, 610 bp, Gossypium hirsutum
ctaggaggaaggagatgattctgctgaatcctgggacatgaatagaacaattggaaatgtttcgggggttttttgcaatttgtggatttttgtttcctttattttctttgaaataattttagtgaagtcctactttggaaccaaatttattaatacactattgattagttgtgagattttaaaataatcaaaaatttcaattacattattttgattgatagtgaggttctttgaatcctatacaaataataatattttattattataataattaacttattattttaaaaggaccgataataaataaataaaatttaagagtcaaaatgtaatttttatcattatattaatttatattttctaaaattaaagggactataaaaataatttttcatttgaaggagactaagaccattactcgccctctccctctacccttgataaagggtttgctttgtatacatcccaatcatcaagcattccatctataggtcactaagttgaatgcttggtatattcacttcaatgacatgatattttacgaggttaagactaagcttctaatgaagttgagcttcgtcaatttttacttccaagtgttgggtgatac

SEQ ID NO: 13644 - DNA, 593 bp, Gossypium hirsutum
gctttacaagaggaatcccagtctcaaataacggcaacacatggtctccgaaataaaatctttcctatattataaggaaaattaacaaatcaaatctccttataaaacagaaaacaaccaagacattgattacagacgtaaattaccatgggcaactccgtcttacaaccaatgaatcacaagtgatcatgtttgagactatagatgtacaacgttattgctcattagatccacattaaatagcacgaacatatatttttatttagaataagacaacttggaatcaatcacctatcctgcattattacttcaggcatatgtctactcagtaaacaaaagtctctatcactttccaaggccaacaatgaaccccattgctaataacatcaatgttaaccatcctttgtgttcagaattatccacagggttcaaagattaaaataccaaattcaacaatctgaatatttgatcactagtagttgaattattgcttgttggtcaaaggattatgtttccagacttatcaccatatactttggacgttatgtcgagaatataagcaagtctccttccctcaacatttgccctttaaa

SEQ ID NO: 13645 - DNA, 654 bp, Gossypium hirsutum
agaataccacagtctgtaaccatcaacaaaagtatcatgcaatgagtcacgagacatcagccctcaacaatatccaaggaaagtgagaaatcggcaaaatacaaatacgaattcatgtattgtaatcttaggcaatagggatcatgccccagccacacttcaataacacaaagtaggaactaatgggactcctgcctctaaagcacaagttgaatggctagcacccttcaattatatgcattgaataggatggagccaccgtggcaaaattcattgaaacggaatgtttgtgcatgtagttttttataccattatccagaagtcaggacatcctggaatgtttctgcatgtcttttatgagaaatccaatctttgttacaggtttttgaaggcgacacgtcaaacagcaatcatatcactttaaaagtatagagtggctagataatgtaaaatggtaatgcaatttctaccaccagaagataaaattctccccgttctctcaaatctcaatggttctctcctccaccacattcacccttatccgtttcttttctttctactttctccaaccaataaaaacctaaacttgaggcattactctataatgataaatttataaagcacgaacataagtattaccttacagacatctgc

SEQ ID NO: 13646 - DNA, 648 bp, Gossypium hirsutum
catacaacctcaggtagttccggtgggacagcacatcgtatcaaagcccaattcaaaccttcgaaaaacggatgttgcttgatctcggcagctcctttttccgttcccaaacgattctcaggctcctttaccaacaaacctcgaatgagttcccttgcttggacactaacaataggactctccggaaatgtaaggctttgtaacacgacattagctagcgtttcatcgttccctgcacctttaaaaggtgtcttaccatagagaagctcgtaaagaaagacaccgtaagtccaccaatcaacggcggctccatgaccttctcctttaatgatctcgggagccaagtactcatgtgttccaacgaaggaattggatcttgcatcagtaggctcggccacgagttgtggcaatgatctaacttgggaagcatggcttggtcttaccgtctttgtttttgtaggagcaggcgataacctaggactgaagcaacggatttgacacgatggttcaatgcaaaagggttcagcgcaacccgatcctccacacgaaccagacatccttgcaggatccaaattcgatgaggattttagaagagttggattaaccgagcatctaagtgaaagatcaaaatccgtgagcataatatgg

SEQ ID NO: 13647 - DNA, 596 bp, Gossypium hirsutum
  misc_feature (53)..(54): n is a, c, g, or t
  misc_feature (57)..(58): n is a, c, g, or t
catatacgtgtagacctagttggactatggcatcaagaaaatgatatactcannttnntaagacattctctaatttgatgagtatttagtaagggctatatggatttattgtgaaaaaatttaagaagttattgatattgagctcaacctatgaattttattaatgaaattgtgattggcaggaaatgttagtgaaatgctctgtttaatgtttattatagtttgttccataagattttttttttaaaaccaatgaacttactaagctttattaagcttactcatgttgttaatgtttcttgtagattaacgtgagtttgcaggatcaaatcaacccatcaggccacactatctagattgttccgatagatttgtaatataacttatgatttatatggcatgtataaggttggattagaaatgagttaaatttgaaatatggttgtgaatgatacatatgtataagtttgtatgcatgtgtttagtagtagtttttagtaattaatgaatagagttattatggtaagtttatgcaaatgagttttgtgatgacttattaagtttataacatgatttttggcttgtattgtatgctt

SEQ ID NO: 13648 - DNA, 658 bp, Gossypium hirsutum
aaataacccttacagtcgaacacatatcaaccaaaacccactaaaaatcccttattttatatagttacgttctccatgttcattaaaatggcatccttctccctaataatcctatttagtatttctctcaaaactttatgctgcatagacaaagatcatatatattccaaaaagttgacattttcaaatccaaccccataaatttaattacttatttatatcctacatgccaagcaaaaacacaaacaattagattcgtattccctataaacagagagaacacatactaaaaccaatttttttttaaaaaaaaacatatattatccgaaacctatttaaaatgtccccaaaccaaagctattcattacctcttccatttcccttagaatcacatctctttccctacgaatcctgtgttcctcaaacttcgaattctgcaaaatatcagccaatatatccaacgctttaaatacatctttatccataactttagcgtaataagtggtttgctccctcgatgtataagcattcaaatgccctcccatattctcaatctcttcctccaagtccctggcagacctcctctctgtccctttaaatatcatatgctccaagaagtgcgccgttccattattctcttcagtctcaaatctcaacc

SEQ ID NO: 13649 - DNA, 654 bp, Gossypium hirsutum
tgagggttctcaatcccacaaaaaacaaagatttccttcagccacatatcctgattggaaagagcagggagaggaacagctatttagtccacatcaaagaaactttaatgccacagagaacttacaaagaaggaaaccgaagtcatatgacaaacaaggcaacaattttactcaaatgaagacatcaagtaaaaactcgccaaccgaacatgcatttcagggatatcgtgatagttgcaaccaaaattcacacttaataagtagtacaataacttcaacaaacagagatcccatagatgaatataaaagattgaaatgaaagaaaaggcatgtattatcatgtaatgcaagcctcacaagaacattgcgacactcttgctgagaagatcttgctggaggacaagaagtgccctcccgaaaatcatgctgtctgagagttccatcttcacttgcactccagaccacattggggtttccaacttcaacctaaaatgggagaagtaaaacctataagaaggtgaagcaatcaaaagaacattattcaccatgtaaagcaacattaatttcaaaaagtttaccactccccatgttcttggtccagttaaattattactatattcgtcagtcatttatgcaataaacctcaccgctaga

SEQ ID NO: 13650 - DNA, 575 bp, Gossypium hirsutum
tccacattttccaggactaacttggaccaaagaaaaagttccagcccccatatgaaaacaattgcctagtttagggcctcactaggacaaaaaaaattccaggcccaaatatggggaaaattgccaagttcatgcctcaaaaagtgatttaacccaatggtatattaaacctattttacaagtcatcctaaacaaattatctacaacattaaagaccagtaaagatcggatttgagaatatagaaagagagtacaaaaagaaatcacctcttgggtcggattcggtcttcttcatagtccatcactccaccaggttcagagtagatctcctcaatccctcgaaagtcaaggtcggcctgcttacagtgtgtaacttctgccacaacgtaagtaagccacatcgaccaacatatcttgatattgaatgagtgaagtttatggcatgctatgtaattatatatgcatatttgcaagaattaaaaggactcgctttcctagcatcaccccctcctcatatatatatcaatatttaaggggaccatgctttttaatagtccaacactgaattacagcaa

SEQ ID NO: 13651 - DNA, 510 bp, Gossypium hirsutum
cacgttgccttctgtttctacaacttatttacactttcatatcagtggcatctgtcctcataaagtgtaacttggatgctttctctatggaatcattattgcatatttatgatacttcaaaagaattgccgttatagaatgtagttttaaaataaaatcagattcaaaagttcttcctttcttgattttcgtggtgttatgctaagtttattgattctcattatcaaaatttaagatttccttttaacactgttgggtttcctttcagagtttgctccttatttgtgttggtgtgtcttggaattctctatccctacaatcgtggaacactatgcactgcgcttgtcattttatattctctgacatctgtagttgctggatacactacagcttccttccactgtcagtttgctgaaactggatgggtatgtttttaatattatttaatgttgcacacactaaaggagcctttttggcttgtttgttaaataagaactgtcggattttcag

SEQ ID NO: 13652 - DNA, 652 bp, Gossypium hirsutum
ccttgagtgtggaaagcttaatatattatgttttcttctatggatacttcaatatagagtaaaatagtcattttgaaaagcatctattctggaagtttattcttagatcatagttaaaacagttcgaagaaataatcctttttggttatgttgtcactctggttaccccccagactttggatctttcattctgcacaatgactaaatacaaggtatcaggaggaaaaaaaaattcccccaataaattagacagtagttataaaataaggtcagtgataggttctttttataattatgtatgttgtgtcttgggtcgcagtcttcttgacaaaatgaaataggatatgaaccttacaaattcactcatcattacgcattaatgtttctgtttttatgcttcatgaatcgtcttaaaacagttacgggtctcattaagtactcttgttcagtacgtgtctcattaagtactcttgttcagtacttactatcaaatgcagaggtatttgttttattgatattttgtccattggcagcatgatgaatcaaagtcccaggaaatgattgagcgaaagataaagaatgctcctcctggtcaaggcaccattcggatgcttactcgtgaagagtgggaagaaattagagaagtcagacc

SEQ ID NO: 13653 - DNA, 637 bp, Gossypium hirsutum
  misc_feature (60)..(64): n is a, c, g, or t
atattttatcccaccatgatggaattttcagtagaagtactatagaagtttttgtactannnnnatattacatttcacctatttactcaaattaaatatgagtaaatagatcaaagactaaattagtcttttttgttaaaaaacatccatatttaccgttaaaaacttatttgtatatattagcataaggtacacgtggcacaccatgtgtcattgtttggtttgccatcctagtttttaacaatacaaatagataaaatttttaatagaaaagatccattttactttttgatttaatgtataggaattaatttatctattttttaaaaaaatgcaatctaaccgttaataagaagactttgcacgatatttttacatgatatttttataattgattgacatatatatgtggcttactaagtatgagaatcagagtcatctggaagattcataagcctctccacaccaccacaacgactatgcccaattaccaatatgttatgtacctgtgtaaacataaaaaatgggtcgttttattttttcattttattgcataaaaaaaaaacccccctcaacacaccatttatattgatctttatttaattaccttaaaagttttataagaatactcatggac

SEQ ID NO: 13654 - DNA, 651 bp, Gossypium hirsutum
ggttgtaggacatgtttattgcgacacttgccgtgttgaattcgagactaaacttagcgaacccattagtggtatataatcaaattcttgcttcttcttcttttttttctttttttttatttcaaatatatgaaaaagaataaaaaataagttgtgtaaaagttgggttgacaaatgtgtttatatgtttggtattgcaggagcagtagtgaaattggaatgtaggaaccgtaccaacgaagcgattacattccagagcccagaaatagtggctgacagtcacggagactaccacatcatagtggaaggcgattatgaggaatcagactgcgacattgctttggtgaggagtccaagggctgattgcagtgatcccaccgaagcgtggagaaaatccagggtggttctcaccacatttgatggtctcagcaataaactgcgttttgccaacaatcttgggtttaagaaggacatagctcttcctcagtgcactcgaattcttaaagagatgggctattatgagcttagtcaagaagatggagactttgagcttagtcaagaagatggagactttacccattcgtcagaactataatatgtattttcacttcaactttctttaaaagctcggcattagcccataataaaaaa

SEQ ID NO: 13655 - DNA, 660 bp, Gossypium hirsutum
aattggaccgttggggtccaagaaatatgttccttttattttcttttaaaaaataaaagttgggagtaacaattcatttgggattgcttttaattaatatttcaatacaagttgtttactatttacttgtggttcccaattcgaattttaatattttgagaatattttactttattaataaaatgaaaatttttttattatatctttagaatacaagttaattagaaataagtttttcaattatataaccttaaattatctgctttttttaccgacctaactcaaaaacatttaatatttacatgatttaggtttaaaaacaattacaggaatgatttgaaataaatagtgcatgcggtgtcaataccccatggccgacacccaagtcaattatatggtaatcattaccgaatgattgttggggattaaattttttttttgatgtcagcactgcaatggctggcaccagtatgtattttttcattcgtattttataaaatacatgtattaattgataaaaaaatttatttggtgtcggcgtctaggtagctggcaccgccactacccagtacaatttttttggtaatttttggtgtcagtattgtggtggccgacacccacatcagtaaaaaagttttttttggatatcgggtttctagg

SEQ ID NO: 13656 - DNA, 650 bp, Gossypium hirsutum
ctgtaaatgcgatgtgaaagtggattgcgtgactaaattgcacttttaactgcagagtactggtttagaacagaattgcagattcactacattaaactacagtggctaccctatgagaagttgcgtgtaaatcttcgttagtttagctactatgattggtttgttcaattattggttattgttacaagataaaatgacatcttcaaatctatttggatagaatatgttttttctataattacagtattggttagccctccactaaaagacatttaggaatcctgacagtaaattttcttttaacggcccttttggtatgcttgatgtagaaagaggagtattatgttcaataccactcaagataaaagatatatcaaggtgtttggtcgatgagaatcgtaatgtttattattattgttatcttgtgttttccatcaaataaaacattaactgtcaatacaagtgatatttaaataccagatttaagtctgttttatttatccttcatcttaaaacaaaaagtcacgtaaatggctcgtaaatgtgatgggatgttttttaacttttcaaggccaaagaatgacattctataaatattttggaattaactcgctatcaggcgaccgtcgatatgtccgagtggttaggag

SEQ ID NO: 13657 - DNA, 649 bp, Gossypium hirsutum
  misc_feature (639)..(644): n is a, c, g, or t
gattgagcaggttaaatctatcataaaagcagtgaatagaaaaccagactggaccagcgagtcaaaccaattgaaccaggatccagtagcctcttcagtttggatactgcaaaccatactcaccaacatgaacacacaaagcaagcacttgaaacataaatcaagatcagtatttaagctagcaatcaaaaacaataataagactttacttactagtaataataatgtcatcataggtaaaagtttaagctttaatacaagaatgcgactacatttaaccatactcacctagatgagcatacaatgcaagcatatgaaacataaatcaagaagccatatttaaactagtaataaaaaataataatactactccacttaccagtaatatcaatgttaccataggtaaaagcctaagctttaatactagtatgcaaccacatcgaaccatactcacctagacgaacatgcatttttttttaatggaaaacaataattatagtccacttactagtaataagaaaacgaaactccatgttaaagcaagcaaattgagcagcaataaatgagaataaactgtgtcgattcagttttcagaacataccataagcacaatggacgtaaacaggctgatttcgagcnnnnnntcgac

SEQ ID NO: 13658 - DNA, 548 bp, Gossypium hirsutum
tttacattaagaaataagtgacgtgactgaagcacaagtgaaatgatctactgacatcatatacgtcgtatattttgacttactgataatcttcaagggtaatggatggattaaataagtgaattgagtttttaaaattaaaaaaataagaagaaacgaatattgtgtttttaccttatagcgagtaacttctaatcctaccctcgtcaaatagataaataaaagagaagagattaataagagggaaacgattctaatcaagtaatgaaaaaaattaaaaatacaaaagaacaataagagaataaaaccatttagttgatcaaatgaggttctaattatttttaaaaaaaataatttagcatcaaataaaaataaaataaaataaaataattcataaaaaatacttaatagaatgggttgatcaaaatctgaaaataaaccaaaaaagaaaagaaaataagaaagatttgaacagaaattaagcacaacaaagggaaaaaagaaaagaacagaagaaagatttgaacagaaattaagcacacaaaggg

SEQ ID NO: 13659 - DNA, 435 bp, Gossypium hirsutum
accccgaacccgagaccgacaccggagtcgaacacgaggtgttaacagactttaaaccctttataaaaatatttctcagacactgccaatctgcgtactagtcgctttaaaaatcatatcttgagtttcacaactcaaaaatcagtttcatgatttttccctgaaactagactcatattcccatctacatatttttttctagaatttttggttggaccaattagtacagtttattagtcaaagtctcccatgttacagggatcgactacactgacctttgcgcattacgacctagatatctccctccacagagcttcaatactgatgccgtttgtttctatagaaactagactcagagaggaatctatccatatatggtatgactcctaattgtctctggttaatttataatgaatttccaaagtcggaacaggg

SEQ ID NO: 13660 - DNA, 599 bp, Gossypium hirsutum
gaattaacaagaggaattttacggaggaagaagaggaaatgctgttagttgcacataggctgcatggtaacaaatgggcgaggattgctaggcttttcgatggtagaaccgataatgcattgaagaaccattggcatgtgatcacggctaggaaacatagagagaaatcaggcgtttacaaaaggaaaaagccttcttcttatgcctgtcgagccctccctaaaggcttgggtttgacgattgtaaacagtgcttgcagcgccagtgatcaatcaaccatttctagcaatattgatcaatcagctaaagtttcctcgccagttcaccaaatggacgtgtccagaagatgtaattatcattttctctccaattctttatgggatgattttatgtttgagatttgaatcgcggtcgaatttattgcagttacgtataatttatcggttaaatgttgtgaaatgtttgtcttgtcacaggttcattgtttgagaatgttgcgaccaggggaattggctacgtggtataccaacaagggttgatggaagcggttacgagtgtgaaccgatctgctacctcattggattcgaactcggaagtat

SEQ ID NO: 13661 - DNA, 618 bp, Gossypium hirsutum
gctgcatatgcagcaactttcctcaaaatccttactttgaaaatgaagaatgctgagaatttgtatgtgaaatctccaaaacctgcatttctcttcatattattattcatccttgttcttcatcttccaaaggctgcatcagtggatgatgatgataacatcaacttcactttccctgatttcaacccaaatacgcatcgcatagtttatgaagctgatgcgtacgcatcaggcaacgcaatacaactcactgctgaccaaataaacaagggtctaaatggtagtgttggtcgagccacttattacaagccaatgcacctttgggacaattcgtcggggaatctcctacttgcagatttcaccactcaattttctttctccattgattccttgcacaatagctcatacggtagtgggtttgcgtttttccttgctcccaatggctcaaaaatcccacctagatccgccggtggttgtttgggacttcaaacttgcaactcgagtttgacttatgatgttaactctaaatttgttgcagtggagtttgatacgtatcacagtccttgggatcctctggggatgtcagagcacgtgggcattgatctcaactatgtagta

SEQ ID NO: 13662 - DNA, 600 bp, Gossypium hirsutum
tgtacctgtcatgaagtatcgagaaatttaccccgagtatcgatacttgagcaaaggtatcggtaccaaatctctattctgacttcctacatgtttcaaaacacataggtatcatttttaaaacacaaatatcgatacctctgctttagacctgaaaaatacaatgtttttaagcatataaaccattccaactcctaccagttcaacatgttatcatatcgacattagttaaacaccgaaatgaccgtaataatagtttcaaacatcaaaagcaaatttgagcaatagtcaacatattacgaaacaaatcccaagatcctaagaaatattaaatcagggagacaactcaaaatatcatatccaatattagcacaaaaactaccacattaccttattcccagaacataaccaaatagtaaacacctatgaataaataatatagaattccttagatcacccctcgaaaagccacaccgctcacatcggcacacaactaatctacaaagtttaagaaggtagtgggtgagcttaacaagctcaatgaatgtaacagcccagttttagctaaaccaaagcagtggttttggaaccacaaatacg

SEQ ID NO: 13663 - DNA, 472 bp, Gossypium hirsutum
atttcctgcactttttgcactttattatgaagattgtcttcctaaggtttagatttttctttgaaagtttcactttatgtcttcctaatgtttagatttttctttgaaagtttcactttaccattgccttctaaactgcttgcaaccctaatttggttaatcattaatgtctgagtgtgcgtttatatttgttttaccacttttctatctatggttatgcgaagagtaaaatgactgatgcataactaaggaatatggtaagcaagacccttacctgcagaattgataaaaggtgaactattttttttatcttctgtttgtcatttgaagcttgaatgcaaccacaagtggattggattgtggcttttaattgcttcaacttaagggtgtgtgatatgtaaatccaggaagaactgcagtgaaaaaatggaccaatttcttaaaagatgtttctaccactctggccagaatg

SEQ ID NO: 13664 - DNA, 568 bp, Gossypium hirsutum
ttttagagtttccgtcctttggttcttaaaactcttttgtcatattaaggtaaaagaggagaagatggttcaaatgatgaacaagatggaggaaagttcaagatggtggtggtttgatagtcaccacgacggttcaaagcgctcccaatggcttcaatccactctttctggtaacaccccttttctcctttctactttcttcatcactatcttagagcttttcttggcatttcttgtttcttgaccgttggagacattgtgtatgcctttttcttttctttctcatgaacgtttcaatttttttaaattgctttttctacagtatgactttacagatatgtaaaaataggacaaacaaaaacgaaatgatgagaagtctctgttaacttttaaccttgaggtgaagaacaaaagatattaataatgggattgcaatggtttcttgtgaattggatctagaagagcaaggactagggaaaaagaaaaataattttatgctaatagtattatttaacaaacattacaaagtaatcctaattagtgtattattgactgcgtaatgacaggc

SEQ ID NO: 13665 - DNA, 605 bp, Gossypium hirsutum
  misc_feature (57)..(62): n is a, c, g, or t
  misc_feature (448)..(448): n is a, c, g, or t
  misc_feature (451)..(451): n is a, c, g, or t
  misc_feature (560)..(564): n is a, c, g, or t
tatcatgtcgatttccgtgcaattgttaatatttatgtatttatttgaaaagaaggnnnnnnaaaattactagaggaattatttaagcgggaatttgcattagtgttttgctgtttcttttttaaatctgcctgatctattgcatcatatggaaatgaatgctttttttttttttttaaggcataattttaaatattgccttttgatgcaagtccaatcgtcctagcacgtttctgtccattttgatttctggttcccatgcccttgctaaatgccctctataattaaaaacttatagttttatttttattgtaatggatggcactgaaggtagccattgcctctgttgatgtttggattgagcgtatgaacaattgtgctttttgtggattaccttcattcatcaaagtgatgttatttgttgctaaggggacagtgttctatgaanaantattgtcctgagttctgccttattaattgtcatttacatgatgagggccaaaaaaaggaggggggggcaaaaaaggggggggggggggaaaaatttggtttttgtaaannnnngggtttggtttaaaaaggaaaaaaacctaccccaaaaaaaa

SEQ ID NO: 13666 - DNA, 451 bp, Gossypium hirsutum
taccttagggaagagaagacattggaagtgggagatatgatgagatttgaggcaattatgataatgtgagtgtgagtatttttataattaaattttgcataacctaaatgagtatgattgagtcacaaagtaaccccacatgtctacattaaagtttagcaataaattctggtcatctcatacactgtggaccatgaatgcttcactttcatttcctcacattacttttccaaggtgcatttttaatgttttgtatagatatctgacctagaaagagtatttaaggaaaatttctgctcataaaaagaaagttttatgggtccattgctgctaagtaattggacatatttatgtggacttcaaattcacaatggtagttgttgaaataaagatttttaaatcaatattttcttcagaaccaaaacctaaacacattgcatgttcttgtggg

SEQ ID NO: 13667 - DNA, 420 bp, Gossypium hirsutum
ctgaaggattgaagcactgcggcgtgcactgccggtgttcgaccttgtgaaaccaagtcctcttcggtatgttatattagggtaaattacacccaaagtcactaaaccatttgatcacttacaaaattatcactgaactattcgaatgtttcatttaagtcactgaaataaaaactttcacatagtataaagaccattttataaaattttaaagttgagtgatcaaaagataaatttactaataaattaatgacctttaatatattttacccttatacttactcaagtcaagctaaattttgtaattagcttaactttgctatttatttttttaatattatcctcgaaacttaactacttcaactatgttaacatgtttgtgggactttgagttttgatcttgtcgcggtttcacaatat

SEQ ID NO: 13668 - DNA, 759 bp, Gossypium hirsutum
  misc_feature (434)..(436): n is a, c, g, or t
  misc_feature (651)..(653): n is a, c, g, or t
  misc_feature (655)..(664): n is a, c, g, or t
  misc_feature (667)..(670): n is a, c, g, or t
  misc_feature (677)..(678): n is a, c, g, or t
  misc_feature (681)..(684): n is a, c, g, or t
  misc_feature (690)..(690): n is a, c, g, or t
  misc_feature (701)..(701): n is a, c, g, or t
  misc_feature (707)..(715): n is a, c, g, or t
  misc_feature (719)..(721): n is a, c, g, or t
  misc_feature (723)..(732): n is a, c, g, or t
  misc_feature (734)..(742): n is a, c, g, or t
  misc_feature (744)..(745): n is a, c, g, or t
  misc_feature (747)..(749): n is a, c, g, or t
ccggttaaagtaaggaggtttacgaatcttcttgaaccggcactcagattccagcataacccgacaatcccagttcgaccatgtcaccacagcaaagttagtgttctttatgcccttcttctcgagccatttatcatgcctaataagagcttcactcaaagtaacacctctatctacctagaacaaatatgtgcatatttagaatacgggctcacaagtcataccagaaaaattaccgagaaaagagcaagacaccccattcaaatatcccaatctaacttgctatcgagaacccttgtcaaaatgaagcctaacaataagagtcccccacagattccatcttatatcgtctatcttgtttgaattctatccaaacacaattcaatagacgctatagtctaaaaatcaaatagatactacttccgagtccacannnggagggtgggtgtggttgttgaatctcacactgagactgagactgggagtgttgagcttgggcctcagcttgcgcctgtgcgagcttttgctgctcaacaaacctgctcatgcgctcaagcaattgagcagccttccgcttccccctatctgtaccattttgagccaagcccatcaaaggacccatcactcccagttcctgggcctctgctaatnnntnnnnnnnnnnaannnnaaaattnntcnnnnctcttntccccttcttnctttcnnnnnnnnncccnnncnnnnnnnnnntnnnnnnnnntnncnnnttttccttct

SEQ ID NO: 13669 - DNA, 652 bp, Gossypium hirsutum
aatgctcgacagagatacgaagaggcggataaaggctcacgaagtactacgtaaggatttgttaaacttaaaatctcagtttgtcttcctttctgatcttgtcatgtgtggctattagcaggccataatttcatgtcactaatcaaaaccatccgaattctcgagactaatggattaagcttgatgatctttttatgttttcactatgggattttgaggtttttggtaacttgcaggccacccttgggttcaggttgatggggtagcaccagacaagccacttgattccgttgtcttaagccgcatgaaacaattttctgcaatggataagctcaagaaaatggccttgagagtaagtttctctcattgacaacggcctccagaaaagatactgaaatggaaactcttttcagtgcagaaatcccacttctaaatgatacttatttggttcgaatctccattattttattgtgttttttaggtcatcgcccaaaggctttctgaagaagaaattgccgggttgaaagaaatgttcaagatgatagacgctgataatagtggccaaatcacctatgatgaacttaaagaaggattgaaaagatttggtgctaatcttgctgaatccgaatttcgtgctctaatgcaggccgta

SEQ ID NO: 13670 - DNA, 613 bp, Gossypium hirsutum
tacagctccctctcttttacagccttctggtttttctttgtatatttctaaaatttgttttatccatgtgcagcatattagacacataactttccacaaataaattctagtattctatatgtgtggtgataaagttttcaacatgtatgccttgcaaaagttttgaaagagttcatggcattgttcccttaaaactattcctcttggatagcttaaaacataccgtgcatgagatcttttcaggaaatgaaatggcgatatgatggaaactgtgagggtttcatgattacttcaagctgaatatttgtttttgtcgccattttgagaaatttctttcaagcaggcttctggaagaaaagaagaagtgaggtatctcttgtggattaggttataccgggttcacaaagtcacggatttcttcagaaagatggagaaggatatacggattaattatctttttacaaggattataaaacttatttttgctgaactctattgcacacatacagccgcttgtatcttttactatttggctaccacactgcctcgtgaaaaagaggggtacacatggattggaagcttaaagttgggagattatagttattctagcttc

SEQ ID NO: 13671 - DNA, 694 bp, Gossypium hirsutum
agagatttaaagtgcctacaaatgcattctaaacatatagataaaacaaaaaaaagactgttaacttgatgaaaatttcaagatgaacaaaaattagatcataaaagaaaggaatatttattaccgttcatcatcatcttcccataaataggtatcctcctgtttaacagattttgtagaaaaattattaaattacatgaataaaagagaaacaatacaatgatagttgcacagacacacaacgaaaggggggagtgttatagcaaacaaaaccaagaagaagaaacagtatactgaggaagtgataactgtaagccaacaaaaccataaatatagtttcagactagcagaagatatatccatgcgtaaggagatatgggacacggtggctatcaaatgacaaatactatatggcatgagctatataaatgtaaaagttcttttctatattctccatgtccattttacattcgagggtcatggttgcccctcccaacaatgccgtctcaaaaggttcgaacctgtattctccgttggaagtgcaatgtgccttaccactgcacccaacatcttactttaaatgacaatttttttgaacagaacatacaaactaaaccataatttcatgtctttattaaatctcaaataaattcaaatctcaagcagcttaaatgtttacctggaagccacgaaa

SEQ ID NO: 13672 - DNA, 472 bp, Gossypium hirsutum
  misc_feature (388)..(388): n is a, c, g, or t
  misc_feature (426)..(426): n is a, c, g, or t
  misc_feature (466)..(467): n is a, c, g, or t
ttcaatgatgatgtaaatttcatataaaaatttcttgatatattaaaatgtaatattctgctctatgcgtgtactttctatggataaaatttgcagtaaagtttccattgttagaatgagaattccaaaggaggcttaactattaaaaccccggaggtgaattttcctgcccctggaccaaccaaagtaacctggaaaccttccttttgacccttatggttccatggcccttatgcctgaatttaccgggacccttttttaactttggatgccaccagggaaccccaggtttccttgaataatcctaaccccttaataaatgaatccggggcctttccaaacttccggtttccaacctcatctttcacttctttttcttgttgtacgngcagccattgaaatcgattagcctgaattaaccacctnaacccacgcgaaccttaggcaaatgaatccaagttatcanngcttt

SEQ ID NO: 13673 - DNA, 361 bp, Gossypium hirsutum
  misc_feature (311)..(311): n is a, c, g, or t
  misc_feature (313)..(313): n is a, c, g, or t
  misc_feature (344)..(344): n is a, c, g, or t
ctcctcaccttttttttcctgcgccgaaaaagagtcttgtagggattcaacccaatgatagcctcgaaaatccttcttaatcatcctccattttcttgtaggtacccaaatattggattgcactaaactaacagaaaatcatatacagagaaaggcgatgatttcctttttgttaaaaattaaaattttgagcaacaccacaagcatattcaaaagagatggatgggcaacctcatgaaaaaaaaaaaaatgaaaatgggctgcgtatctcgtctttaattattggataaaataaaaagaggaaaaaaaananatgaaaagtggggggggtccgctattggtgnggggcatacttaaataa

SEQ ID NO: 13674 - DNA, 608 bp, Gossypium hirsutum
cttgcaagatctcctctttgtcagcattgaccctcctcagataatcctcatctttccttcttttgttgtggtaatcatcggctgcatgatacctactcttcaaattatcatctctttccctaagtcttgtactaacatccttatcacgatgaactttataactgccattaacaaactgttttctagaaggtggataaccatctctttcagtcctttcatttcctcgaaccttagtcctgttcctagaacccatttcatcatcatgtcctctcttaaagtcctcagatctattttttctgctgtaaagatcatcttctccccattgccaagtaccatcagtgttgtcacactcccttcgcctatcaaaaccctctgttttaatgggaaaatcatgtgacaagttagcatcaaagtctctaagaggataagaatcctctcctggagtacctgtcatgcgatttctctcaatctcaagtctcccatcacaatattttctctgggaactatgatcatgttcatcaagattcttcctgacattcccaacacgagatgaatgtccaccctgaacgacctcctcctcagcactctctggtcgtttctgataatac

SEQ ID NO: 13675 - DNA, 547 bp, Gossypium hirsutum
gagcgatcatgacagatcaatgaggacctggtttctcattttgaagatggcagcaaagaagatgaacatactggagacaaaacaaaagaaaccttcgaagtcccaacatatgaaattcaaaacgaaaaggtcagttctcgaaatgctcatctataatcctttggttcttttcttgcctcttctcttgtgatcttgaatcttaaattcacaacagccgaccttggaaactccaaaggatgctgcaagcgacaatatcgagaaagagactgttgctaaagatgaaactgtgaaggatgacatgaaagaagccactatagtagaggaggtaagaatctagtaagaaaaatgatatcacattatgagtagaaggcaatgaaacaacttcaagcttaatgtagtttaagagggttctaaaagaatccttttcaaggtccatccatggagtctaaacatgtcattacataacatactatgtctagcatagatatatcactaatgtaacatttgacgaacagattccaggagagaaagatcctactgagtgcaa

SEQ ID NO: 13676 - DNA, 668 bp, Gossypium hirsutum
catcatactcagcttccaaaatttgccgttctgcctctgcaatggccaagaggcgaggatcacgcaaatccacaggggtgccagagattgtccagcctccactgtaagacagatacaaaaatcaatatgatggaatcttccaaccagattatacagactaatctgtcaagcaagtttcgatcaaagtttgtgatggatgtcatgcttgataaatctcacagcatatgctgatttcatctttacaagaagtccaccaaataccaaccatagcatagaaatgtcttacatgtgagaccatctaacttacccaatatcaatagcggtttcttcagtttgggggcgagatggagcaatataaccaggttgataaggctgcacagcaaattaaaaggatagactacatcagcaaggagtcacaacaaccaataatcaatagccactgaacaagaagaatttaacatcatgattaaaagccatactgtgtctgaccaaaaagttgctcatatttaaccactatcgtgataaattctgagaagtaaaaagaacaatgaaaggaaaactgcatgataaaccaggaataacgaaacaaggccttttcccatcgatcaaatggtttattaatattcttcctaaaagcagatgatacttgatcaccctattccacactc

SEQ ID NO: 13677 - DNA, 461 bp, Gossypium hirsutum
attgattcgatctgttcttgatggatacaatgtttgcatatttgcttatggtcaaactggctcaggaaaaacttatactatggtgagctgtctgctaatatttttccatttcaaatatatagattattttaaacttgttggctatgtcttatgcatatttattcttctttccagagtggacctaatttgtcttctaaagaagactggggagtcaactatagagctttgaatgatctttttcaaatctctcaaagcaggaagagctccattatatatgaagttggtgttcaaatggttgagatatataatgaacaagttcgtgatctgcttgttattgacagttctcagagaagatatcctttattttaatcttttgaatttcatttcttatgtttcttgattctggtctgaaatttggctctataacttatgttctattgctattgttccttatcctcagt

SEQ ID NO: 13678 - DNA, 685 bp, Gossypium hirsutum
catagattacgttctggagaaggcatagaggcctcatttctcaggcctccgtagcccaaccgccaccgccacctccaccgcattgtctgacgccaatggtcctcgtcagcccttcgtcatgggtattcctcaattctctcctcttctacacaaacaaagaaatagaacatttctctttgaattgttttttctttttgctgtaattagctgttttcgccgtttttgctctgaaaatatgattacttaaaattaaattacaggaagctttttattttttatattgtaattgtacaggggtttcaggaggtaccgcttctggtaagacgacagtctgcgatatgattatccaacagcttcacgatcaccgtgttgttcttgccaatcaggttcaaattcaagttaatttgttcatcttataactgaaatttaccaaactttttgctcacatttctattctttatggatgaaggattcattttaccgtggtttaactactgaagagttaaaacgcgtgcacgagtataattttgataatcccggtatattaatattgtttgctgaattttgttgtctccttttatattggatgctattgttttgatcatgcattggttttttgggtttttatagatgcttttgataccgagcagcttctgggttgtattgagaagctcaaagatgggtc

SEQ ID NO: 13679 - DNA, 623 bp, Gossypium hirsutum
gtggtaatcattagtgcagggactaatgatttcgttttcaatttctatgatattccgaccagacgattggagttcgacattgttggataccaacattttctgcttcagaaactagaagattttctcaaggtaattaattacacttctcactcacttaacctgagaatcctcaggatttaattcctattaatataggcaattgtgagaggcaaaaagtaaaatagtaatcatggaatataataataatgcttaatgtcatttaaatgattaatattttctcattataaatttgaaattagggttttattttttattttttagaattagagtgaaatttaattcgaaaaagaagaacctcaaattaatagaaaaatataaatattaaggattaaatttgatattaaatctaatattttttattctcaatatcagttttatgattcacattcgaactacatgcttgtcctccttgtctcgaaactcattatcaaagcagagtctaaccactgtgcagtagtatcttattactgaatttatttatatataggaattgtatgaactcggatgccgaaaaatgatcgtagccggactgcctcccatcggttgcttaccgattcaaatga

SEQ ID NO: 13680 - DNA, 607 bp, Gossypium hirsutum
  misc_feature (523)..(523): n is a, c, g, or t
  misc_feature (577)..(577): n is a, c, g, or t
gagtttctgcttctgacatgggcatgcaaatgctgctgagtttgctgcagtgagagcttgctggatatgtttttgttgttctctttttcagtgtacattattttcaaatgctaatagtgtgcattttgttctgaatgcaggctgcaaaacaattctctgaggggcttgaagctcaagataaatcttttgaggtaaagttgaattctgtattttctgtgtcactttgtgctgctgcatgtgcacgctttattttgatttgtcttgtcttgtgtcgataatggtcatgtttggtagtctagataataaggtccatgcttttaggttaggtatttgtattcgcttgctcaattgatggccagggtaagagagtcagcttttatccctttacaaaaaaaaagttattctaatatttgagagttaaatatataagctactagagatcttactgagcttgtgtgtctaaatctgtggttctgtagtctgtaagggcccaagttttctcaagttaggtacctcatcaatnaagatagcattcagcaatttgggacttttaggtgtactggagccaaatgaattngtcatgtcttttttataaaaccttaaaact

SEQ ID NO: 13681 - DNA, 523 bp, Gossypium hirsutum
  misc_feature (518)..(518): n is a, c, g, or t
cctggtgagggaccaagtaaccaaccactacgaaggccggagataagggttcaacgatccgttgttgatgaccgcttatttacgtgggctgccgtcggacttaccattgctattttggttcttttgttcaagaaatacatcaaatctagtggacatggtgctgttttcatggatggttcatagttctagcaacatcagctcaataaggaagaaagaaatccatcagtatatttgtttaaatcttagcatgggattaatttgaaagtataatattcagctttttgtaattaatggtgtgtttaatcaatcaattatcttatgtaagcatgaccaatacaattataaatttggttttaaaatgcaatattataaaaaaagtatataataaatgttaaatttatttgttttttttttcgtttaaaaaactctaaatcaattattgatattgttggtattttcagtcaaatttgtcatcaataaactcatgtaatcaatacttaagggaagcaaatgttaanaccaa

SEQ ID NO: 13682 - DNA, 658 bp, Gossypium hirsutum
ctgcaacattaggatattggttggcattaaaattctgcaaataatcttatttccattggatatctagaaagctttcgaaatggattaaacaatacaaagctaaatacgaaccatccacttcacaagctgattccatgcctaccgaacgaaaaccagaacaatggttcacaggaagtccttttgatgtgcttgctgatagcaacctagttgtcattgagagggcaccttcttcacccttaaataagagtagtctcaaacatttaagtgttttgtttggattactcgttgattttttcagaatttaaattgaatcaagatatcttgaatatcataaaggaaaagtccaaatttattcttttactcctttaccaaatcattttttaatttaacatgaagtgctaaccttcactactaaaccagaatgaacacctcttcttttcataagcattaacaatggttcctcataaccttcatgataaaatccagtgccaattgattccctcccctttgcctgttaaagaaacacaacattccttgagaaataagcacaccagtctacattaggaatttttagctagataaagcatcctaaaaatgtatccacatatgtacaatgtacacaatatattaaactaacaccactaacattgctatccac

SEQ ID NO: 13683 - DNA, 680 bp, Gossypium hirsutum
tttccagtcccatcatgaatcttgttgtcaccattgacagaagaaaattacactaacacatgtaataataaaaatactatgaacaccttgacaatcggattatattttatatttcctattcagaaaataaataagataatctatatccgttacattaaaaaaaaattttattcatttatacagttaaaaactaactagattgataagataattacatgcaacatattaatatacaagaactagtttttaataataaaaacgaaagattttttgacaaaatactaactttctatttgatctaatgtataaataccaatttgtcaaattattttagtaaatgaagatattacaattcgaactctcaccacaaatactccaaaatacttttactttaacccttttaaaactttcccaacaatcaaggtctacctagattcgaatcttgccaaatattcccatatgatgaatggttcattagctcttttcgaaacctgtgacatgcaatgactctttctttaattacattttcatgatatcaacctttctaacttcaatccttccttccatctttatgggaagtttttatctatacttaaaatcggattagttcaaatccttaaatctactaatattattttctttcattcacaaaacttgacccaacgagagttattatctca

SEQ ID NO: 13684 - DNA, 640 bp, Gossypium hirsutum
ttcggccctaagactaccagtccaaaatactatgaaggatttatggaggcctctagaaagaggcagcattaaaataaattttgatgcatcgttccatgcagcaagccatagctctatctctgggtttattgctagaaatgattcgggtcagattatgggagcgggtacttaccctaattctgatgtagcggatgcgtttgtagcagaggcgagagcgtgtgaacgggcggtcatttttgcaacagagatgggattccgggatgtccattttgaaagagactcgctgacagtaattaaaaagatttactcaagagaagaagataaatcggttctcaggttcaaaatattaaagattataagaggaactttgacagggttactttccgttttgttcgtagggaagctagcacagcggcgcatgcacttgcgggtgaaggtcgtcggtaccaagaggctgtgtactggattgaaaaagacccatatgtggtggatcagattgtggctgaggactgggttcaatggtacgcagaggagtggatagcaattcgcagctttgtggcgtggagaaactctatcttgtactccatggaggtcatgaaagctttttctctctgaaattagtcgcttcaatctcatgcag

SEQ ID NO: 13685 - DNA, 660 bp, Gossypium hirsutum
agttaaagacttagacgtgccaaaaacagcatttcgagtgaggtatggtcataatgaatttttggtaatgccttttggcctaacaaatgctcctacggttttcatggacttgatgaatcgaattttctgaccttatttggataaatttgttgtagtgtttattgatgatatcttgatttattctcgtgacaaatctgaacagctgatcatttaaggactgttttgcaaactttgagagataagaaattgtatgctaagtttagcaaaagtgagttctggcttagagaggtcagatttttagggcatattgtatcgtgggatccaagttgatccgagtaaaattttagccattgttgattagaaaccgccgaggaacgtatcttaggttagaagctttttgggcttagctggctattacagacggtttgttaaaggattctccatgattgctactttgttgatgaggctgttatagaaagatgtaaagttcgaatggatagaaaaatgccaacagagttttgagaaattaaaggcattgttgactgaggctctagttttattacaacctgaaccaggaaaagaatttgtggtttatagtgatatgtccttaaatggattaggttgtgtacttatgtaagaaggcaaggtaatagcttatgc

SEQ ID NO: 13686 - DNA, 445 bp, Gossypium hirsutum
acatactgcaagcatccttcacactcattaattggtatgcacttgaagagagcagccgtcctttaaagaacctccaagcttgaagcaactttctgcaatacttggttattttattcactcgcttagcactagaagattcctgtctttccttgaaaaacctcctggcctcggcttcagtgtctcgaaaccttataagccctattcctgatggcaacataagaggataaaagacaaggaggtatatcaggtactttgagattaacaggcttgcttcccgacattgtccattttcagtatcactttgaagacctgagttgtaacaaatctctgtagcaatgtgccagataagaatactctggtcgaactcaacatcaatactccactcaagcttagctggcaatttatcctcatgtttttgaagtatgctctctcccctttggcggca

SEQ ID NO: 13687 - DNA, 651 bp, Gossypium hirsutum
attggaagggacttacttcagatgttaagacatgggtcagagaatgtatagtctgccagagatgcaaaggggagaacgtggcttcccctggtcttctacagcctttgccgatacctgaccgagcatggtctgtaatcagtatggatttcattgaagggttgtcgttttcagacaagaaaaattcaattctagtagtggtagaccatctcactaaatatggtcattttttggccctgactcatccatacatagctaaagaggtggcccaggagtatttgactcatgtctacaaacttcatggcatgcccgactccattatctcggaccgtgataaaatctttgttagtggtttttggcaggagctattccagaaatcaagtactaagcttcttttatccacagcttaccaccctcaaacggatggccagattgaggtcctgaatatgtttcttgagagttatttgaggtgtatgacaggggagacacctacacactggtttaaatggttacccattgctgaatggtggtataattcttcatttcattcctctattcaacttaccccgtacgaggcattgtatgggcagcccccacccacgcatatgccatatttggctggtgcttcttcgtagcagtggtggactgaagctt

SEQ ID NO: 13688 - DNA, 411 bp, Gossypium hirsutum
tctccatcgatttgttaggtacaaaattttgacaaagcaaagaattgatccattgaacttatgagtgtttatttgcattgcaggtttttaggtttgaaccaatttgccaaaagggaccaagctaggggcgtgccaaaataattgattgtagagtgatattaagcatacaaaaggacacttgagaagatgtttttaaatggcgaatagtattatatgccatgattgggtctgttttaataaagttttaggtggtattgattatactattattgaaaatcagttgtaatcaaatagtcttttatcttcaaaatctaggatttaaaataataaaaaatatgtaagcatgtttagtaaagtcttcgtccattttaaaatttttgttaagtgtttaagtttggtggcatccatata

SEQ ID NO: 13689 - DNA, 677 bp, Gossypium hirsutum
  misc_feature (532)..(538): n is a, c, g, or t
  misc_feature (646)..(646): n is a, c, g, or t
attctgagagcttacttcgatgtttaaggtacagattttaaacaataaaatgaagaaatttgattgaagaaaattccaaaatgaggaatcatcaaatatgttaaatgtctttgttttgattctctttacctaaatatacctgcaagatggttccacatggataataagaccagggatcttaggtaaaagtacagaaactggttgtttcaaagcaatagaaggtgatacgaaattttcatctttgcaaagataacaaatcacatccacaatgcaaactttgcctacacatctactacagcactcatcatcatcacaattccagatactaacaaagttgtcatcagaggttttcaagacctcaagagcttcagcaatggtggatgtgatggaaagtgaccttagtgctggcttcccaagacacaggtcagacaactcatgtgacaatagacttactgccatgcaaaaaggaaaagtacggaaattttgagtaacttaaagtggggtataaagggttgcttcttctttctatctnnnnnnntcttgactctccatgcaagcttgaataatgctcgcatggttgcagattctttatcgagaactatcccagtcggttcatctccggaatcggaaggtaccgtatcataanaggcagtaaaagtcgcatcagatagacggaa

SEQ ID NO: 13690 - DNA, 414 bp, Gossypium hirsutum
catgttcaatgaaacatggctaaaggatccacctccatcttttggatgatggaacttacaggatgcaccaaatttacaggttccggtttttaaataaaactgcacgtgcaaaaagagaaaaaggaaaagaaacaagttaaaaagagaggtgcttgcagctttaattagcagagttgactcacaggaaaacaattttgcatttttcaataaactaatttactcttctacctgacatacaggttcccctggtcgttcagggtactcccctgttgctcttactgcagcctcaacctaaatggcatcagaaccaaataaaaataaggaattcaactcttgaaaaaaacttaaagctgaaaacgaggtaattccggcctcagtttaaaacaacaggctagatgaccaaagtaaattctc

SEQ ID NO: 13691 - DNA, 575 bp, Gossypium hirsutum
ttttttgggggaaaccggaaactttttgtaagggagttgaaattaattgtaatttttacgataataaaaatgcaattttatcattttaatagtttatatctttataatttttaaatgattaaatcaattttttattatttttaaggggtcaaagtataattttacttttattaatttaaaattttaaaaactttaaagggctaaaatgaaaattttttctggagtcaagggtttgccctctccctaggtacgccctgattataatattattttttaattatattattactaaatgaatattttttattttaaaatgttacattgataaattttataatattaacaattaaatttaaaatttgaaagaaaaaaaaaagataatatgaaatttttgaaaaaatataaagattaaatttcaaatttgtgaatagtaaccagaaaagagaaagatgtatagtttttattcttttttataaatatatatttaccattttaatttaaaatgaggtatattttctcgaaattatttacaaatatttttcaggtaagaaaacttgaaatatgccttgcaaaga

SEQ ID NO: 13692 - DNA, 475 bp, Gossypium hirsutum
catctgttatgttgatagtttttcccatatcttgcataatctgctatccgattctttttttcttcataaaacaagtctcagtctgggttccgtctccaacgtccctctggattcagatgataatgatccaatgtcgctcttactaggtgcgtttcctctccctttcttaaaggttcttctgcgattttgtgagcgtagactttctctgttctgttaataaactggaaattgattttttgaaagcacatattcttgctttgaatatcgttgatgattgctcctataactgatttatcttgcttcattgtctagtatttcttgatgactgtgcgtgaatctgtaacgcccctaacccgaatcagtcaccggaataaagttatggagcattatcgaagttactgatttatttatcagatatttcattaatccgatatctttcttttctatgttcaagtctcgtatttgagtcatccga

SEQ ID NO: 13693 - DNA, 567 bp, Gossypium hirsutum
ttatctcttactacatatatctttaatatgggagctttatcattaatattttattatttcagttttattttataatatttattttaagttttagatatcttttgcatggctaggattattagttttccttggggtttaaatctaaggttaagaatagaactttatttgcaagaaaacctagtaaatttacttgcaaagaagtctattataaatatgctgtaactttattacagccacaagcccacaacattattattatgttctttgaattaatcgaagaaactagaggtttttctataaacttatgatttttagagtttcactttctttctaacccatttttctgcctttctttcgattgctgctgtttttctgtctaaacaacatcaattttggtatcaaagcctagttaaaacgtaggatctagattagggtttgcttttaagccatggttggacgtgttagagatcaaggaggaactcagtgtcaagaaacagaattggttgcattatgacatgcgatttaagaattggttgtgataagaaaaagtggaaacctggatggaaa

SEQ ID NO: 13694 - DNA, 459 bp, Gossypium hirsutum
ttgagatgctgttccacactgtatggtgcacttaattggacatttgtctgtgctcttaaagaactattaaatctaactgaacctaaatgtatttcactgtaagagaactttcaccttttgtttcgtaagtgtgttagcagtcagtggggtggcataaagtccggaattgaacaaaacctacagtcttaatgcttgaaagcatgctaaagtctaatttgtttacttcaccttaattcttcaaactctcctgacttgggcctttctatcttgtctattgtaaaacatgattaccaggatttgaagcagatagttccggtccataattctcatgttattgctcttaaacaagtctgcccaaataacttaaatggaggggttttaacgtaaggtttgctgttttggttagcttgttatttcattcgtgttcattactttttcattggtcttgttatcctgttg

SEQ ID NO: 13695 - DNA, 460 bp, Gossypium hirsutum
ggtttattatgcttttcaaatgataatcattaatgtggatacttggataaatccaagtgtaaaaatatttttattgaatattttattgtttttaatgaaacccaagacttgaatgagaaattcgaaagaagttgtggttgcaacttatgaatagtaccttcagtatagtattggatgtggggaatttaggaagacaaaaactgggttagtccattaacaaaatgggtttacttcttggtgggtacttcattgtgggaattacagggcattaataggaagcctatccaccgatccatgatgccagggcaaaacaccttccacagtttggtccactcgtaccaatggggtaccgtcaagtaattgtccccacggcaggaccctgctactattgccttcccacactcacatgctgattccaatggcattacactgatttcaacctgccagaacaccattcaat

SEQ ID NO: 13696 - DNA, 354 bp, Gossypium hirsutum
gagccaatcaaattaatgcatctttgaatggtttccgaagtcaaataagaatttgaaaaataaaccaaatcagagactaaagctaataccgtgaactaaaaactaaaagcactataattcaaaggggaaaaggaaggaaatttaaaaatatattaatcaataacgagtgatagaatcaacgcgcacggtcgatctggaaaatccaacaaacagttctgtttttttttccttttttgcaaccgattttagaaacccggacgagttaaagttcttactagaaagaccagaaaagattcctccagcttcttcttctttaattttatttttaccaacgaaggaaaattttgaaaaaaa

SEQ ID NO: 13697 - DNA, 651 bp, Gossypium hirsutum
ctgcatttgttaagatttagggagcaacttttagagttgacaaaagtttatataatttaagcttaagatataaataaataaaaatcaattaaggttataaagaaatttaccttatcgagctattagtgccaacaaaaacaattaattaaactcttcccttgttagttgatcggtttaattattaactataaaaaaaataaaaattagaaaatatatacatctagaatgaattttgacaaattattgtccgggttcatttaaatctagacaaacatttattcaaattcattctatatgagtgtaaaattataaaaaaattcaaaaattaaaaagattataaaaaagattcaaaataaaaataaaaatattaataatttataataaaaaaaacacatttagaatgaacttgagcggtcctcgggtgtcttcttgtagtgccatgtgttgagccaggtgatggtataacaacattaatcaatcaaaattatatataatttccaaaaaaattattgtgattaattgcttttatttgctgcttttcaaaattgataaggattaaattgttcaaaaattttgagaaggaccaattttcccaaatgagagggggtggagagatgtttttaccaatatattatgggaggacatagaaag

SEQ ID NO: 13698 - DNA, 456 bp, Gossypium hirsutum
ttgctatcgatccttgtagtttgataaaatctaaaaattagtcatgtaactttttttatttaaatttataatccaatcatcaacgtcatacttgaaataaaattattaaatcgaaactcacttaatatttttaataaaatttccatctttttttaggttatttgataaaaaatgcaaatttaaggactaaaagagataacaaattaaataaagagttaaaatgactattattatgaagttgaagggccaaaaaatcattacgccaaaaagcaaatcacgtcagcccagacaaagctgcagtcaattcatttccatcggatcaatccaattccaccattttcaatctcttatttataaattcaacaccctctctctatttctttaatcaaagcctcaaaagctcaaaaaagcgttccaaaaaaaccaagtctgtctttgtctttctcaatgacaatg

SEQ ID NO: 13699 - DNA, 651 bp, Gossypium hirsutum
atttagttttcccactccacacttttgtttacaatgttaggtaacaatggcttatatttttttggaataaaagcttggtctaggtttttgttggtcaaatcaatttattttgctttttttttactaaaaaaaagtaaatcagtttttttatgttatattaaatagtaaattggttctttctgttaaaaatttaattcatttttacagttaaaaattagtatagctgatgaaataattaaatagctacacgtggcgtgtcacatgtatcttatgctgacatgtatgagtcattttttaacagtaaaaatagatagaatttttaacaaaaagatcaatttactcttaaatagataaaatacaatcctattcataatataaacttccataatacttttataaatataaaaataaattgaaaattattaatattccaaacaacgcataataaaacatgattttgatattataaaatcaattgataataaataaacatgtgaatttgatttgaacataaaaataccacatgcatgaacctaaataaattggtcttatattcaaaaggtagatattctagtacctgaaacatccaaacttttcaaagtgggttgaaaactcagtcaataaaaagggaagttagggagtgaaatgtca

SEQ ID NO: 13700 - DNA, 573 bp, Gossypium hirsutum
  misc_feature (544)..(546): n is a, c, g, or t
  misc_feature (565)..(569): n is a, c, g, or t
tcaactcttttttggaaggatagaacagaacatcgagaagctgactgaggcagtcttctcgtaattttgcatcgaattggaggccccccatgggggtttatcacatgttccaccattaacagatgagaatttcacggaccttatctcacaaacggaagcagatgaagatgaccgtttatctttgcacgatgtgtattcattaatcattacaattgtctctgtttttgtatgctttttcttgtatgttgatatatacgagtcgaacaatgttagaagagatagcattccttgatactgaaacaaaacagtcgaatactttgcagcttatgttcttctgaatgttagatctccataaataacattctatgttgctattttcctatctgctgataaattatgagttaaagatcaagctgttgagctttgttattatggttactgtttagtcgagtaccggaaacttctgaactgcaaatgaatctgagtaccagaaacttctgaactgataccatcaagttcttggtgcagtgtgtgaactatgagnnngatggagtgatgtccggtnnnnngaga

SEQ ID NO: 13701 - DNA, 517 bp, Gossypium hirsutum
  misc_feature (459)..(459): n is a, c, g, or t
ccacattgatctaactgatcgaaagcaaatcatatgaataaaaatctccaaatatcaacatgtatattatgtcaatatctatccaaaaacaatttcaacattgtctatggagaagtttacatagaaacatatgtatataaaataaatttacctgaacatgaagggtggagcggttatcaggagaaggttgaggcaagcacaaaacaggggtgccctcagcatcgacagcaaaccttacaccaacgcccaagggccacccatcttgagctaaagtggaaagggtccctatagaagacaattccattatggtcctggaaacctcggcgggaaatggcttgtggctggtttttgttggtgggactgaaacagtggagagcgaggaccataatttgaaggagggtttgaattttgcttgaaggaatttggattttggagggaagggtggaaggggaaaggggnttgacaaagattgagttaggatttggagattcattttcatttccctttggattttctt

SEQ ID NO: 13702 - DNA, 601 bp, Gossypium hirsutum
  misc_feature (589)..(589): n is a, c, g, or t
  misc_feature (591)..(594): n is a, c, g, or t
tgttggagctttccatagaaataacaatctagtaaataagattcataagcgcaaatagacttttctatcatcaataaaagtattttaaagttgcatcgattttaaggggccatctttatagatttgatgtcaagttattgacacacttgcataatttacactataagtagaaaagaataaatcattactacttgccccagaccaactaaaaaccactaccatgacttctgctgatggtttaaatatccgaatacaaagaataagcatctctagcatattaaagaaaatgtaattcatacctggtccaaaggatcagtcaactccgagaatgcattggccagttcacgaccacatatgaagagttcaaatctctcagtcaaacctgcatgcctattttccagagaacttagagtaagtaattctgaaagtgaagacaacaatatgcgcaaattcctacataaaattgcaccagttccttgtaaaacttccatacctccggtgaggtttggcaagaggagatatttcaatgggatagtccaaaacaaatgtaggttgcaggagcttcggtcaacaaaaattcaaaaaccgnannnnaaaaaat

SEQ ID NO: 13703 - DNA, 590 bp, Gossypium hirsutum
  misc_feature (41)..(41): n is a, c, g, or t
  misc_feature (43)..(43): n is a, c, g, or t
taatcccttatctcggatcggagatgctaacggggcgggantntaagtgggggacctatctaccgcctgtgtctatctcctgtcaagtatgctccccagacatagactacgaacagggtagtacttttggaatcatcgcgtgaacataacattaagttacgaatgtaattcccgagggatcgaccactattctaaatatagtaaggcggggaactgttgttcattggagcgccggagtgcagaggttgtttccatcattgaagtcagagtgtgggactgagccttccgaatgaaaaaaacaaaaaagtgcttaatttcgttggaaaaaccaacgcaaatatcatattgactttctctcgccctacttctaaagatagatagaaaaggttggagagagtgactttcaacaattctctcctttctaaagctgcgaaaggcggccccctcagaacaaagcctacccctcttttccctctttaatgaaagaccctcgcctctcttcctattcatttgtgggtcgggacccgagggcctttttttatcaagttatcaagaggtgatttcgaaaatcaaccaaccgacaaatccac

SEQ ID NO: 13704 - DNA, 552 bp, Gossypium hirsutum
  misc_feature (539)..(539): n is a, c, g, or t
ttttggaaagaattaacatgtccacaccacattttgatacgagtaacatagcttgtagaaacccacagattttatttttaaattcaattatttgaacttgtaactatcataacaaagtaatttaatctttaatgaaattgatgtcggacatggaagggaattgcttcaaattaaggtaatctttttatatgatggttgagcacttctaactttagggtgggctggatagagggtatggtttagaaaagaaagacttaatttagggatcaaaagaaagcaaaaaagaagaaaaaaaggtatagatatctgtgctgatttctgtggtgaatagtaccctaaacagtggtttgagttgaagcttggggttgcttttgtggaagttcagttagagtttgataggtggccattctagggtttcaataaaactatctagggctggtgttatttttaaacaatgctgcaaagctgaagaagataaactatctagccttctcaccaatgctcaaatacttcacactttggctaggaattccaaaaancaaaagcaacccc

SEQ ID NO: 13705 - DNA, 576 bp, Gossypium hirsutum
  misc_feature (489)..(489): n is a, c, g, or t
  misc_feature (491)..(493): n is a, c, g, or t
  misc_feature (496)..(503): n is a, c, g, or t
  misc_feature (508)..(508): n is a, c, g, or t
  misc_feature (510)..(536): n is a, c, g, or t
  misc_feature (538)..(538): n is a, c, g, or t
  misc_feature (544)..(548): n is a, c, g, or t
  misc_feature (550)..(559): n is a, c, g, or t
  misc_feature (561)..(564): n is a, c, g, or t
  misc_feature (569)..(572): n is a, c, g, or t
ccctgcaacaatttccataagatgattttcaaatgtaattccatattgagaaggcatgtttcaactaatgtacaattacataaagtccacaatcccatcttttgataaaattccatcaccttaagcataaatactcgtatttatagcatacagggtaaaaaggaaccctttccacctcaaactatactactgtcagcaactattcgaaatatatatatactaatgtcaactcagtgaacagagcagcttgtttgaaactacactataaaaagaatggggaaactgaattacactcttaactgagtttgtaaggtgttcaatctacacaaggggaataaaagttgaagtacttagttgcaaagttattttcttcagataccaaatagataatttcactatagttcaactagaaaatatgtaattgaccctttttatattatgcaacatcagctacatattatgcaacctaaacaacctatatcatgcaangnnnagnnnnnnnnacttncnnnnnnnnnnnnnnnnnnnnnnnnnnnanctcccnnnnncnnnnnnnnnncnnnnaatannnnaaaa

SEQ ID NO: 13706 - DNA, 548 bp, Gossypium hirsutum
gttagctagcttgatactgcccacgataaaagcagatcctaggacttcagtgccggtgataattgccaatatccgtagccaaatggggtacacgccctcttaccgcaaggcttggatagctaagcaaaaggcgttggagaagatgcatagtgggtgggacgcctcatataatgaaatatggcagtggtgtcaggtgctagagagatacgtcccaggtgccatcacagaccttgaaacggaacatgcgtactacaacggccgattgctacgtggatgccaagtgttcaaacgcctgttttggacctttaagcaatgccgagacgcatttccatactgcaagccgttggtacaaattgacggtaccttcatgttcggtaggtatactcatcggctattgcttgcagtggcacaggacggcggtgggagaattcttccaattgcatttgcaataacaccgggggagtcgtctgatgactgggatttctttctctctaggttaaggaggcatgtgtgcccccaacctgatatctgtgttatttcagatcggg

SEQ ID NO: 13707 - DNA, 495 bp, Gossypium hirsutum
acacgaaggtgtggtggcgcacgcacgagaggggagcgtgctggctgtgcagccatgcggcgcctaaggttttccagggtttcctgcttctgattttgggctgcgttgtgccttgggcacgggttagatggggtatttgggctagggtctgttgggtctagtattttccgggttttggtatttagaaattaagcctattgtattgggttaggtgttattaggctgcttttttaattatttctttggacttttggactattattttattttatttagtttatatatgtgatgtatataggccgggcataaattgggcattacatgtgagagatcttgtgtccaactctctttccttaagatgttttttttcccaaaccctaccttcaaacatttggtttatatattatttagacatgtagcaaaggaggcataatatcatatagacatgtaggctcccatatgcagctccgcctttaggcctccacgagcggacac

SEQ ID NO: 13708 - DNA, 440 bp, Gossypium hirsutum
agttgaggtcatgggctttcaaaaccgcttcagccatttttgctgaagaaactacaagggttggcttaaatccaaatcgcaaggacataagaggaccatagttttgagagggtttccaaaggaaaatatgagggaggagtgagttatcaagcatcagcatacgtaagtgaccaatgaagggaagacctggagggcctggggggagatgattaaaattgccattgttgctaatgctctgttttagcagaattatgaagagaaagaaggggagagctagaagaaatatcatgaatagtgtaattgccattctgttccaccaatctgcgtgaaacttgagggaaagatttacaattagatgagcatgtatttaacatgcagttctctattctgcatgaagttgacattgtgcgactctttcggtgttcatgggctttgcttaa

SEQ ID NO: 13709 - DNA, 673 bp, Gossypium hirsutum
ccagcggttacttctggaatcttaatctggaacacatactttagattagtgctgacaattctttattctaactggtaggatgttattcttttattccaaagtcatgttgttatacttttccatcacaatgatttatcagtactatttagtgtccttcacttgtttttatttgtgtttttcagttctttacaacggaacctcttccctgtgatccttcaagcttgccaaagtatcctccaagcaaagagttagatgcaaaattaagggatgaggaagctagaaggtgcatattatatatttaattacaatgaaatattcatcttctttatttttttccgaagatacttatgctatgtggaagatcacatgcttcttaggaaaatattcctttttggtctctttttcgtacttgtgagaatttgcttctagaaagaaagaagtgcttcaaaaggataatccaaaaacttttaactgcacatcagttcacaagtaaataatttgatttctttgatcttaagcctgtgctggtctactgtaaatgtggtgttttcttatactggataagctattattgtcttctttctcccactgtggttgtaatgacctcaaatcttgagtggttggtataagtgctgataaacttttattttttattgtaagacgagtggctgga

SEQ ID NO: 13710 - DNA, 673 bp, Gossypium hirsutum
cctccgcttccatccacgaatcccggttcgtttttgaattaataatggaaatgaataagaatgagcaacttcattcctgttttaagctttcccttagatcctacaattttttgttgatgtcgttatcgaaattcttgatgattgatgaaatgaaatccgtttatagtgagatgttgaacaatagggtttcacccaatatttttacttggaatactatggttaatggttattgtaagattgggaatgtggttgaggctcaacgctatgtcactaaaatcgtccaagcgggattaaatcccgatacctttacttatacttcgttaatattggggcattgtaggaataaggatgtagatagcgcatttaggatttttagaatgatgccaagtaagggttgtcgaagaaatgaggtttcgtatacgaatcttattcacggtctatgtgaggctgaacgggttgatgaggctattaagttgtttgaggcgatgggggaggatttttgttatcctacggttcgtacatacactgtgattatttttggattgtgtgaaaccgggaggaagtcagaaggaataaaattgttcaaggaaatgtcacagaaagggtgtgagccgaatgctcatacttatacagtaatcattgatagcttatgtaaagacaataaggttgatga

SEQ ID NO: 13711 - DNA, 562 bp, Gossypium hirsutum
agtttgcatcaacagaagaagctaataacatgaaagagttacaaacaaaagaacttacggcagtaaaaaagaaactatacgcaaatctctgaagacactaaaataccaatcaagataacacaaacaaggatttccattaagattttcactaagaaatttatccagtttcaaaatccttcattattagttgaatgaggttccatcagctaataaagtgacaaaaaattgatgaaatgaagagcaaattatagcacaaaatgcgcaaagtctactaagcaattaaaaggagaaaagccaagaaatgttaaggataagaaattaagaataatctctatatccaattcttagacaacaataatctctatacccaattctttgaactaaaacaaaacccacacacaccaaaaaaaaataaaaaaaataaataaatcttagaggaaattattcaactattcgaacagttcaatagaaatcaaatctagattttaacccttaagccattgcacacaaaaatagataaactaaaacctaccttattgcatagacctagcaaaaaaaaaaa

SEQ ID NO: 13712 - DNA, 527 bp, Gossypium hirsutum
tttaatttaacgtcatgttgaatagtacgaggacccatcacagcatccacagccctgtgagctacagcacttccagtaccaaatgccatgcctgcaacatggagataaagaaaataattaactaatagtattaacagagtaaggaaccatcacaaatcaaccagagacatgtacaaccgttcaccgtctcagaaggatatctattcacataccctgagctatggtagagcctatgcctccgagcaaggatccaccacttccactctgagcaggagctggaggaggagcatgatgagctgcagcaataagaattaaatacaattaaacatgacattcaatcaaagaaataactactactagcttttatcaaaatgagtaaatacaaatgttaataaatcaatatgaacttgtcaattgggcagatcatgttgattttgggtagtatcaatctaaatcacgtaagtgtgtttttgagttcaggtttcaaatttggggatcaaattttttggattggatcatttctggtt

SEQ ID NO: 13713 - DNA, 512 bp, Gossypium hirsutum
  misc_feature (480)..(485): n is a, c, g, or t
aaaatcccaatcctctctctctcttcttgttcattcaaaccaaggctaagcagcttcaacagggctgcaccaactaaatgtggattcatggaaaatatgatgatggagagcttgagcatggatatattgaacatttcattttaaattttccaaaagagtgaacaactttcacttccttttgatgccattgtttgctgcatttgtttaagaggtcttgtaatggtctggtgccatgatttcatgaagaagttataatctgaatttatttataattatatatatgtatactttttaagaatagataaggtttctgattgtgttaaatttgaaatatggcctctgttatagaccaaaaggataaaagaaatgatctgtaaaagactaagagagttgcctgccagtgttatttgtgaaatgtcaattttttttataaaacaattttcattatgtgaatatgtctgcctcttatatggatctctnnnnnnatcttcactctcataagcttaccacca

SEQ ID NO: 13714 - DNA, 467 bp, Gossypium hirsutum
cactgtcattaacgttgctggtattgctgctaggcccagagacaacctccatccccatggctcaagcttttgagttccataatttaccatgtttgctgtaaagattccgagcgttgttgctaactgaaacatcatgttgagggctcctcgaagatgagttggtgccatttctgacagatataatggaacagccttcataataagcatgaaaaatagcacggctcagaaatatctaccaaactatctcatagataaagtaaaacatactaggcattgctcattgcctgtgattagaggccaatgaattactcctatgcttcaaagatatggagaaggggaaatttttttcactacaggaagatcaaacaacgttattacctggtttccgaatcctatcccaacaccgagcatgattcgaccaaagaggagcattgccagattttgagctgcagcattgacagagacag

SEQ ID NO: 13715 - DNA, 463 bp, Gossypium hirsutum
caccttcttctccatagcctttctttaacaatggttccccttttcctttaggagacctgaaactcagcttcctttttctccaagacaaaatgctgcgcttggaactctgcagtagggatggctctgacaccagtttagcagaatcctcgacatttgagcagccaacatccgacttacggttactgtagtacacccaatcctcatctccctcactgatcctcatgctagagtaaactgatcctccagcataatttgcatcagccagagtaccataactaaatgacttcctgacaacagagtcatcttttacctcatccgattctccttcctcggaatcgtcaagtgaatctgtgtccaatggatactcaccatcatcactcctggcagaacaccttccttcactgccttcatcctcacgacaggcttttttcgctcccctggtagaaactctcctctctaaaaa

SEQ ID NO: 13716 - DNA, 637 bp, Gossypium hirsutum
  misc_feature (35)..(35): n is a, c, g, or t
  misc_feature (615)..(617): n is a, c, g, or t
  misc_feature (629)..(631): n is a, c, g, or t
gggttttatcttcacaaggtatgtgccgaggcacntttggagcttaatcatccttttcatcacgatcatcctcttcttcttatggattcacatcttattacaaaaccgaattattcatcagggtacatctgtaatttctgtgatgaagaggataataagtttgtttatcactgctcttgttgtgaattggacttacatattaaatgtgctattgtttacatttaatattgctgagaataatttgaaagagcttgaccatgttacccttcaacatcctttgatttccactgaaaatggtgatgaacaactagaagatgatagtaagtgcttcgggtgtagggaaccattagcaaagtatacacacttttctcctgactgtggatttaatttacatgagaaatgcgccgagcttcctttcgaactgaatcttgtgtgccatcgcgaacatcctcttgttctacaattttatagcgaacggatctcttgcgagatatgctgccggcgaacaaggccaagaggatttgtttatggttgttctccttgcaagttcgttgttcacattgaatgtgcatcgcaatcaccattacatactattaataatactaatcatgaacnnncatttaccttgnnnaacggg

SEQ ID NO: 13717 - DNA, 650 bp, Gossypium hirsutum
aatttatggcaaccgaacgtactcttttgtaaataggggcccagtaaatttttgctcctgcgaatttaaattataaattttctgaagagtttaaccatataacaattttactattttggggcaactttatttgcaaagattaataattaggccctttagattatgttagattcgtgatacaatatgtttggttggactgaataatttattcaattttcgaaggtgattttttagttcgattaaaagaataatctattcggttaaatgtaagtgataataattttgagcattccctaaaatggttgtttcctactcataaggaatagataataaataaaaaaactatttcttcaaaatactttagaatgaccattgctcaccttgttgccacgaagagttccattcatcgtcatcgaaatagcgaacaatggtaaagatgacaaaaggtggcaacacaaagaataccacccaaaagccaatagcaaccaaaagatacgataaaaggagagcttttttggaatttttggtagcaaactttagacttagatttaggtttttagagtttgatttagcaaaagatgagtggataattggaaaattgagaaaaaaaatcaatttgtggtgaaattttgaggcagctactggcagag

SEQ ID NO: 13718 - DNA, 674 bp, Gossypium hirsutum
gtagcggagaaggttacaaagagcgtaataataccttggctcaaattcatgaatttctagttaaaataaaaatgtaatttttttgttgctttccatcattttcgaatttgatttttgtaaaattataataattaagatagttgtgtatttagaatatgaacaagatatacgtgcgaatttggggtaaatttgcatgttgaatgatgtttattttgtttaaattagttaatggaatatctttatagttttttctagactggatctggaatatttcattcctcatttccttaatttgttgatacaatgtagcatcataattattttggattaaattgagaaaatttaaattctagaagaattcaaagcaatatttcctaatttaattgtctttgagatggttccttttctgttcactttagtaaaccagtatgccgacgtatgcagcttccaacaagtagagtgagtcccctctattgaaatacaatttaaacccatgtcgaggtagcagtagagaaggtaataaaagcagtgggtgagagtcttaaggttgatgaattgtcgataagggttggaggctttggcggctactcaaaataaacttggaaactatttcatgttccaacttccacctttcaactacgttctaacttccatctttaactaggtgtctcggg

SEQ ID NO: 13719 - DNA, 683 bp, Gossypium hirsutum
catatagagcacgacattaaatgttcgcctttaaactctcttactatagcatttgtagtacataaaactaacatactatcaattgcaattatatttgatcactacatctttgcctcatctgcattctgagaatattttataatactaaaacttagccttctcaagttaaggcatcaaaatgttgaggtcatcaagttgtggacattggatgaggccagcattccttcaatttcaacttagttcagcaaacaagcactttaatctaccaaaactccactacatcatcaaatacggaaatagctcacatattaaaatacagacatcacaatttcaccgcacaaacaaataatgctactcataatttatcccctaagaaacttagccaccatgaaacattccatttatgaacagatcaaaatatcacacacaaaaaaattaagcaaataataaaattgaaggggctccattaactttgaacaaatgtatcaatcaagcaagtaattatattttaattgtgtcaaataataaaatttatttttcaatttatatctaaataagatttgtgtttagataggtctatgactttcattggatggacaattcaatcaactctagtgaaattaaaaatagtagtagcggtgagattaattgttgtaatagtgagcttgaacaccatagtgatg

SEQ ID NO: 13720 - DNA, 531 bp, Gossypium hirsutum
ttaaggatataatttttttatccttttaactttataaaaatatcattataatcctccatttaattttttattgtgtttttttgtcaatcaccccaaaatgaatgaaaattttaacatattttaactttattgatgtggcatacacgtgaattgctacatggataacacttcattatttaattattttttaaaatattagaaaaatatttttttataattttcatatttttaataatttcactgatttataatttttgaaaatatttttataaatttatctgaatttttaaaattttaaaaaaattaattaaataatgaagtgtcattcatatgaaaatccacatgtatatcacattatcaaagttaaaaaagttattttctgcatccattttgaggtaatttgataaaaaaatacaagtttaaaaggttaaaaaaacaaaaaaattaaatgaaattaataaaatattttttctataaaattgaatgaataaataaatcattatataagtgatatggtccgctacttctaca

SEQ ID NO: 13721 - DNA, 419 bp, Gossypium hirsutum
gggaatcgatcactttacaccactatctctcatttcaaagagcacaacaatatttggtttatattcccgattatactctaaaaaaatctatgtaaacttactactagcacacctttgatgctttcaagaaaatatagataaattcataaaaaaataaaaaacaaagataagtgacaaacatactggaaatacaaaaatatacacacactttttcatgtctttttaaactcaaatccatgctgtttcggcaattttttttttgaaaaataaatattaagtataaaataattaaattacactcaaattatgaacatgttgaatttaaattaattttatattaaattttaatcaattttgattatttttgacagatttgcacaaagcgggaaaaaaatgctcgatagacactgctaaaaaca

SEQ ID NO: 13722 - DNA, 656 bp, Gossypium hirsutum
gatgttgtaccgatgcaaaattgccatatcctcctaagatgcctacagctgtttgaccgacgggtccattatgatggtcgtactaatcgatacacgtttgagtgtcaaagccaaaaagtcaccttggcatcattgactccgggtcagattcgagaggataagaaaaaatgacaagagcaaaagaaaaataaagtaaaaataagagagaaaaagaaaaacaaaatggaattgaaaaaaaaatgaaaataagtgtgagaaagaggaaaaataaattaagaaggaagaaaaataagagagtgtgaatgatcaaacaaaagtgaggattcttttaactaatctcggttcaagttttctttgtgatatctcttcatttcaagtttctaaaaatcaaatggtcgagctccaactccattaccttccaaatgaaggtagatttcgcgtataggaaaaaggtcagttagaaagtggaaacattcttcaagttatggaaggtaagcaaggtaaggatctgtttaagattcaagcaaattgaaattctttaaatgttgataatttttctcttaaaagacctcttaacaatattttttcttgttgttattttttgaatatttgttcaagcatttgtctcaaaatattttcctcatgacatgccattt

SEQ ID NO: 13723 - DNA, 634 bp, Gossypium hirsutum
  misc_feature (62)..(62): n is a, c, g, or t
  misc_feature (343)..(343): n is a, c, g, or t
  misc_feature (349)..(349): n is a, c, g, or t
  misc_feature (351)..(351): n is a, c, g, or t
  misc_feature (354)..(354): n is a, c, g, or t
  misc_feature (360)..(360): n is a, c, g, or t
  misc_feature (363)..(363): n is a, c, g, or t
  misc_feature (372)..(372): n is a, c, g, or t
  misc_feature (382)..(382): n is a, c, g, or t
  misc_feature (388)..(389): n is a, c, g, or t
  misc_feature (391)..(391): n is a, c, g, or t
  misc_feature (396)..(396): n is a, c, g, or t
  misc_feature (399)..(399): n is a, c, g, or t
  misc_feature (404)..(404): n is a, c, g, or t
  misc_feature (415)..(415): n is a, c, g, or t
  misc_feature (421)..(421): n is a, c, g, or t
  misc_feature (424)..(424): n is a, c, g, or t
  misc_feature (427)..(427): n is a, c, g, or t
  misc_feature (431)..(431): n is a, c, g, or t
  misc_feature (433)..(433): n is a, c, g, or t
  misc_feature (441)..(441): n is a, c, g, or t
  misc_feature (445)..(445): n is a, c, g, or t
  misc_feature (448)..(448): n is a, c, g, or t
  misc_feature (451)..(451): n is a, c, g, or t
  misc_feature (462)..(462): n is a, c, g, or t
  misc_feature (477)..(477): n is a, c, g, or t
  misc_feature (484)..(484): n is a, c, g, or t
  misc_feature (486)..(486): n is a, c, g, or t
  misc_feature (490)..(490): n is a, c, g, or t
  misc_feature (492)..(492): n is a, c, g, or t
  misc_feature (501)..(501): n is a, c, g, or t
  misc_feature (507)..(507): n is a, c, g, or t
  misc_feature (509)..(509): n is a, c, g, or t
  misc_feature (514)..(514): n is a, c, g, or t
  misc_feature (520)..(520): n is a, c, g, or t
  misc_feature (523)..(523): n is a, c, g, or t
  misc_feature (527)..(528): n is a, c, g, or t
  misc_feature (606)..(607): n is a, c, g, or t
  misc_feature (612)..(612): n is a, c, g, or t
acagagaatcagaaaaaacagcagacaaaattaaaacgtctaccaacaatactacgtcaacngagcaacaatacaaaaacacaccaccaagctttaaacattttctccctattaaagccagcaatcgccacggaagatgccaattcattacctttctaatcggccaccgagaacacaacttttccagcctttaacatatcactatcgatgcctgcaaaaattgcttttgagagaccaaggtctcattgccttgttaacacaccaagaacacaccaccaaagatccaagttcaataaataatgaatcataaattttccagttcaaagataaaaaaaaaaaaaanttccananccncctttnacngccccgtcncggccacaanagctannanagcanccnccgcnccaaaaaaaanggtttngcnacncccncnttatctcncagnacnccnccacaatcgcntttctcctcttttgnaaccccncncaananaaaatttanccatangnaacanagcacngtngacnnccccttctttaacccttaaattttttgattttggagggaaaaaaattttttgaattttcttggttccccaaaacccanngttancttttttaaaccccccctttcc

SEQ ID NO: 13724 - DNA, 600 bp, Gossypium hirsutum
aggtaggacggggcgagcaatttttttttttaagggctaaaagtgacatttcagagcatgtaggaagttgacagggcaaccaaatagttgttggaaggcctgctaaaattattattcatctaaatatttcatgaaaattgtctcttacccttttatcccttgtatttggctttatttattctcataatttttatatgctccattaaaacctatttgtacctaaaaaaagttaacaaatgatgtaccaaaataaagctaacaaattaagaggtccgaaaaagtagggaagcggttgccgctaccttctaattttatcattattggtgggatggattttccgaatgattttatgctttcatttggaaagaaaatatttgaggcaatgaatttgataagcttataagtacacatgcatatgataagtaatatttacgtaaaaatgaatttaactctgttttttttcttctgaaaacatgaaattttaaagtgaaaaaaaacaaagggtatttatagttccattggaactggtgtacaagtttaccgtacaaatttgtagtttactgtgttgaggaggggtatgttgggaagataggggaaatt

SEQ ID NO: 13725 - DNA, 672 bp, Gossypium hirsutum
cggtaatatcatttcacaagagtggacaaaaatgtttcaagaatggtgcaaagtattcggtctttagttatatagtataatgtgtagtataatccttgactgcttgatatgatacaggttttgatgaatgttttgtcaactcgaggagttcttgaacaaggtgcatgcctggatgctttaatctcgatactgttggattcgtcagccaatcaaatggtattttatccttttttggctgtggaatgtgttatatatctaaacttactaatgcttttgtttcaacttatagtctgttggtttatttcaatttcctttttggctgccaacttttattaacagctctcagtattctaatgctaatgctactgtctcatgaacctgtattcctgcatcatcatggttgcataaccttgatatctgtttcagcttggacaattactctttaaatttgtttgtgccatttgtaaatcctcttttctgtcttaatccttaaagaagttaagttttcaaggagtgttagctcaccagcattagtaaattatagtgaaggcgttcttctgcagccttctccttttgtctaggagaagaaaaaatagcccaactttacttggtatccacttcgttttgtttcttttatgaagaaataatctcaagttctcttcaggccttatc

SEQ ID NO: 13726 - DNA, 669 bp, Gossypium hirsutum
taatgcacatcttctaaatgcccccggtggctggttttgtccatctatctgaacttaatataaacaatcctgagttaagctggagtagttctactgatatctgtgaatcaagtcaagtgtttgaacgagtactgtcaacttagctaagtcgaaagaaaatgtcttgctcatgaatacatggattgaatgaagggtttacgtgaaagtatacttgaattaagaaatgttaaactatgctatattacaaggtatagtatggttgatctaattgaaaagatttcatcgtaaacttgcatgatcttaatggaagttctctgttatccgtttgcaggggatgggtgggttatgcccttgcattgatggtgttattttttgcgatctttatggttcttacgcgatttttcaaccaaggcaggcctgtggatgaaatcaagataatagcacctccacctatgaatacaatggagcagcttttggctgttcagaatgcagtatctcaatttgaacaacttatccaagacggaaacatcattcttctcaagttccgtgccctgttgctgtctgttttcccgcaggttgttctccctacttgtcaccgtagagtacataagactgattttattatagtctgcttgactttgtagctacacgatgtttaatctaccaggc

SEQ ID NO: 13727 - DNA, 590 bp, Gossypium hirsutum
taaatccagcattctcttcagcatcccaaaccatcaaaaattgtaatttcttttaaaaaactccaaacatctgtatataagttaaatactatgatgcgagagatattgaaagatctcctcgagagttagactcagccgtcttactactctctttgttgctgtcgttttgaatacaaatgcttggctgatagttgtagtactacagtgacaagtaatgcttgagcgtaacaaaccaagcaagctttagatttgggttatttagggggtaatgaatattttctatttcagaacaaaacaaagcaccaattgagccatcatcatcgtccatgttgactaaataatcccaacaacctctgctctactggtaacacaactccaccctaaattgtcgacttgataatagttccatatgttgcaagcttatcaaaaaagcattttctttctaaaaaaaatggagaactcaacattaagaacaaacattagtgttgtagtaattctctacctcccataatttggaagaacaaaacaaagaaccccaaaaccatgtgggagacaaacacattcagaattcaaacagtgagctaatgtaa

SEQ ID NO: 13728 - DNA, 565 bp, Gossypium hirsutum
ggtgccaaccgcatttacatttatataaaacttaagataatggatgatggttttaccagatgatggagattggattcgttgtctacaggtttccttccagtcagtaattcgagtaggacaatcccatagctgtaaacatctgacttctcagtcaggcgggaagtgcgggcatattcagggtctatataaccaatagtgcccatgatgtaagtggaagtgtgagactttgagatgcataagcttttcgcaatgccaaaatcagtaatatgagcctcaaaatccttgtccaacagaatgttagatgacttgacatccctgtggatgattctgggactacaatcatgatgcagataagctaacccttgcgctgctccaagtgctatccttaaacgcatgccccaaccaagctttttcttcttggtagaaactgcagtaaaagtataccttaaatttgtaattcagagttaaaaaaaaaaaaaaggtttcttttgccaaaaaaattaaaaaaattttttttcccaaattttttttttagcaagggaaaaaaaaaggggttggtttcccc

SEQ ID NO: 13729 - DNA, 508 bp, Gossypium hirsutum
  misc_feature (58)..(59): n is a, c, g, or t
  misc_feature (63)..(66): n is a, c, g, or t
cattgttctttcttttgggtcttgttcatagtattagatcagaatgcagtcatatatnncctnnnnagtgtgagaaagacaacatttcttttatgtttaggatgtttggaaatcaaactttaaatgatgtctgatgatatatgcataaagattagcggtggaacttcctgtcatgagaccagaagctgagggtacaaaggtggcaacattaaggccacacccggatctttttttttttaatttaattaaaaaaaaaaaaaaaaaaaccctccaaaacttttttttacctaaaaaaaaatttttaacttttactaaaaaaaaaatttgtttttacaatcaaaatttaaattgtttgaaagcaaaaactaaaaaatgaaatataaaacccttttttttaaaaaaatttttaatttttaaaaaaaacttttttggggaaaaaaaaatcaatttttttttaaaaaaaatttgaaaaaaacttggttaaaacccctaaaaagaaaaaaagttt

SEQ ID NO: 13730 - DNA, 684 bp, Gossypium hirsutum
taaaccgaagaccaagcgtttgcttcaatccaattaaaagctatggggccgagaaaggcgtcggggatgccgaaggaactgactaaagcaagcgcatgaggtcggagttcagtgcagagttttgttatttctctcctcgcattggcaccattgtccactgataggtacccatattgtagaaacgaaacatcttcgatacatatcaaggcatataatgatctcaatgtacctaagacatcctgcataagaagaaaatgaaaagactcttaacataaattctaaaaccagaaccagaagcatgcttttaaggtttcaattgtggtacatataaagtttcctggatttaaatcaactccatttgcaaagatcctatatattagcaattttttgattatattcatcctaccatatgccctgaaactatacagttagggacagctttagaaaactgtacatattaggtttgagttgttttgggtttagggttagatgacaatgagccgctggtttgatggcaaaatgacttctgaagggtttaagttcaagataggcagttagaggcttccttagagaactttatagagtcaagtttgagttgttttgagtttagggttaaaacaacaatgagctattggtctaatggaaaaatgacttccgaagggttcaagttcaagtatggcattg

SEQ ID NO: 13731 - DNA, 671 bp, Gossypium hirsutum
ggctcccaagatgatgttttcactatgtattttcaaataaattgcttatatgttctttgggactttgaagttgcgctaagatcaagaagcaaaaaggaataagctcaagcttaaagagagataggcaacaaaatattaggtctattaacaagttttaagttgaaattcttcatataacctatgcctatagtaagattactatatctctgattcataagaagaaatgcaggttcacatccacacgttttcggttgcatcatgtttatcgcaattgtgaataacaaagacaagaacaaccaaaaccacaaactaatgatattaatgtcgtgtttatcgcaattgtgaattatggtctcttaatttctctctgattttgcaaatctgccagggatttgaaagaaatccccactttcagaaaaaggccctagctaaagctacatgaataaagtagaattaaattccaaaattattagtataagagaggaaaaaaaagctgagaatcccaagaacaaatataaaaccaaacagatcttataacaaaattggggtactaacaaaaattgagatacagccatatgttaaaagcaatcaaacagtggaaaccgtatggaatgttcacagatgatacctaagaaggctcaatcaccaaagcaggatcttggaatcatcga

SEQ ID NO: 13732 - DNA, 533 bp, Gossypium hirsutum
tggatggggatgggtttcattgttattttgatcctcaccaaaagacataactttggcaccagcctccaccacctcccccgccatacaacctccacaccttagcttcaaccatcccaaccaacctccatgctttatcgtatccaatggcgttatcgccactaccgccgcccccttcgtccggcgtcggacacaaatccttcccaccacacaagaaacaacagctagaaaagtcagaactgagatgacggcgaagaatggccctagagaccctgacgacggtgacgaagtagtactgcttcccactgccgccgcttggctgcttgcggtgtctccttgaagtggtaatgatgaaatagaagatgccattgcaattgtattaattggtaaattaagcaagaaaaacgatgctataaatacacaatattccatggatttatgcaaaaaggagaatattttgaagaaaagcgagggtcggccataaaaagagaaagatgggaagccaacatggaaagggagtttgcttgcatcagaaa

SEQ ID NO: 13733 - DNA, 538 bp, Gossypium hirsutum
accatgggaagatcaatcctctacttcagcaccatccattgatcccttcaagttactcaaaattgtccaaaatccagatgggtcactcactcgacaatctcttttcccttcagtttcaattacagatgaagaaagcaccagttccaacacatctcaactcgccttcttcaaggacatccctctgaatccccaaaacaaaaccttcattcgtctctataggccaccaactccaccaccaagcaccaatcataagctccctctcttaatacactttcacggtggcggctttatcctcttcagcgctacttctcgtcctttccatgatgcatgcagtctcaaggcagttaaactcccagccgtagtcctctctctcgaataccgtctggcaccagagcatcgccttccggctgcatacgatgatgccgttgaaaccatcatgtgggtccgggaccaggcgatggacgtcaacggctgtgatccgtggttaaaagagtatgtagatttttccaagtgttttctgattggttctagtgcaagg

SEQ ID NO: 13734 - DNA, 612 bp, Gossypium hirsutum
  misc_feature (59)..(59): n is a, c, g, or t
aaactcaattttacaaacacactacctataacaaaattgatctaaaccatatatagaanattaaagaaaccgatgtaaatcttaagaaaacaacccttacacttacccgattcgcacttgactgaaaaaaaaaccaatttggagaacggcaaatgtcaagaataatggaacaaaaacaaaacggctaaaaattactagcactttgatttataatgacgatagaaccaaaaggtgatcaaacaaaagaaaacaaaataaaaggtggaaaacaaagaatgttgaagcatccagaatcaaacctgcttattgaaacaaattgagaaaaatgaaaaatgggagtggaaaggaaaaatagaacgtgggtgaagttgggattcttttccctttttttctcttctaaaagtttaaaaaaaaaacaaacaaataaatataaagtaaaataatttaattaatatttaacaaaaaccaatcagatttgtttttgaaaggaattgaaaccaaaaacaaaactaaaaactaaataaaaataattcctacaaagcacatacaagtatgcaaacccaaaacctaagagaaaattaacacttaaccactaaaccactaagttcatca

SEQ ID NO: 13735 - DNA, 707 bp, Gossypium hirsutum
  misc_feature (629)..(644): n is a, c, g, or t
  misc_feature (651)..(654): n is a, c, g, or t
  misc_feature (681)..(685): n is a, c, g, or t
  misc_feature (689)..(696): n is a, c, g, or t
tcttttgagttgttttgctgtattgatttttgtattaaaaattccactggtttgttgctaatactaaaattttccaaacattccgaccctcaaattcaatgaccactctatcccatccgctccctatcaaattccctctcaactcgccaacttcctcccacgccactccctccaaatcccttatcctttgcaagaaacgcaataacgacaccgcgtttgaggagcataaatcggggttcgtcgactacgacaagggccagcacgaggtttccactcgggtgagtggactcaggaaggcccatatccctaaacggtaccgtttgcgtgtagaaggcgaccgcttccagaaggactggaccatatctgaggtggtcgaccgagtgctggagctcaatcactgggagaatgtcgaaccggtactgaaccggtgggttggccgttttgctaggaaaaatttccccttcctcattaaggtatgccgcgttcttatgcttctataaagctataaaatacatagctgttactctttgcattttttttcttaaaatagttccaagcataagtgcacattcttcatttactcgtttttaataaggaaaaaaaaagggcaaaaccaaaggaaaaaccannnnnnnnnnnnnnnnaataatnnnnaatgcttccccgcctcacatttctacnnnnnctcnnnnnnnnaaaaaaaaaaa

SEQ ID NO: 13736 - DNA, 631 bp, Gossypium hirsutum
tgggaattagttcacctagaactttacccaccacatcgatcatatcaaggtactcttcctcttctaccaggactatttcgagtacacaatctgtcaataatatgtcatctagcaggtcaaggtccaaaaccatatctccagcattgatggctgagagaaaacaaaaggggctctgtttttggtgtgcagctaaatatcatgcggggcataagtgtatgaagtcttagttgtaccaatttttattggagcctttttctgatagtgaagttgaggaatttcaagagtgttcagagaagttggaagagaatgataatgaagaagagggacccaaatctcctgttatttctttgcatgagctgacaggacttcaaggacacaatactatgagagtggctactcgattagggtcatgttgggctattatcttagttgattctggaagtactcgtaatttcattgacacgaaattggtcaatagactgtccttaccagtgataagtcaggagcaattaaaagtatcggtagcaaatggtagttgcctattcactaagggattgtgtaaaggagttagatgggaggtgcaggatcacaaatttgagactgacttcatggtcttatcattgaaaggttg

SEQ ID NO: 13737 - DNA, 626 bp, Gossypium hirsutum
  misc_feature (612)..(616): n is a, c, g, or t
tttataattcgatcgacggcctcaccggtactataatgtttccagtcaatttgttcattggtcatcgatgatcgaaccacactgtcttttgaaaattcaatattggtggtggctccgttggtcatttgctcgttgtttttggctgctactgtattaaaaaaagaggtgaaagtgcataccacgtgtacattatagggatctgattcagcactctaatatttacccaatttttaattaaattaataacaacaaaatcctctttttattgaaccatctttatattttgaagaataatacaaaaaatttacatattgattacatcatcaaatcctttaaatacatacaaagcaccaacattctttttttctggtcttacaagtgaacttggatcaatcagcccctctagcacaaatcatagaccttacttttggaaattttaatgaatgtttgtaattttttttcatgtttcgtttagttttaatgcaacctgacccaaatgccttgacttggaatacctttatgaaccacaaacaatagataaaatcctgacggagctacattccctgaccgcggcgtcgttgcttcgacattgtacgtcgagtttacccaatnnnnnaaggatatgc

SEQ ID NO: 13738 - DNA, 625 bp, Gossypium hirsutum
tgatcctgttggaataatgatgttttcctgagatatattatcataaaatgagctgccatgaatatacaactttgaataaagttttagtgagttttacaagaaataaagatagaacataaacattaatctagtatccacatagcaaaatggtgtctactatacgtctctatcgcccaacctttctcacttcttcctctttttcatttggcaaatgactgcagagattgcatgttatcatatttgagcattttgtaaccttataaagcatagattaagccacagaaattaaaccaaattattaatgtttttaatatccagctaatgaagcttcttatctgtggatagcatgtttcttcagcttctattctcaacttatatgagtttgtatccacatagcacacgagttgacacgggacatgagttcattccagacattgttaaattagataaacatttttttccataaataggtcaaacaaataaaacttacatatttctgttgatgccttggtttctattacaatttaaatgcccaccagcttttaaaatttgaccccataaaatttgaactttttacaaactctttttaaaattgaaagaaaaccagaaagttggcgtagaattc

SEQ ID NO: 13739 - DNA, 406 bp, Gossypium hirsutum
gtgggattgaagcagaagcattttttctttcaactagaaaaccatcctcaagataaaatccaaccaaattcgaaggattactctttctcaaactagattcaaatcccttaaactctacatcattccaccttatttctaaccccaaaaaatcagataaagaaaattcccccacattttcctacaacatccaaatttcgtctaatcaaaacaatttcaataaaaacaactaaaatggtaagaaaaagaaaatagaaacactatcattctattacgataaaaaaacataaacaaataaaaatcattaaaaaatattggcttgtagatccatccaagttaagcgagtgaaggaaccatcggtaccgagaagtagattggaatttgatcggcagaggtgtctcatggtagg

SEQ ID NO: 13740 - DNA, 611 bp, Gossypium hirsutum
ggtccaactcacaataccaattcaaacactctactaaaggttatcactgtaagaagctgctcactgtggaagataaactttcaaaaggttattataaaattctaagttgctatgattattcattttcatgaagtacctatgtctgacacatattcagacatggaatatggggataagaccttccaaagaccctcaaaatttaaaataataataataataataataataataataataataaacatacactcacacccgagtccaagtaacatagataaatatatatttggaagctgcttcacatgacattcctgtatgaataaaacaaggttctccaacaagcttgtttgtgtatctgtctatgtttcttttttcttctttccacaattgatttctacgaacattaataatgcatttttgtttttcatccttgatcatttagaaggcttcaattaaagagaaactatttttctgccaacaatactcatataacttgtgagatgtagaaaatgatggagattaaagtttcacaaatatgtatattagggaaagttattaataaattaaatattatattacacatgaccaagtcccaagaaatagcatccaac

SEQ ID NO: 13741 - DNA, 627 bp, Gossypium hirsutum
cttgatgacgttctcaataagaatttctgattattattattttaaacttaaaacacttttctcttgctcatttcatgcttcagtttattatcttcattatgtcggtaagccagcaatggattcaattaaagttgtttctggaagttgtggagatagtatatatatatccaccgcaaggcttagatcaatcttctctcttccaccatcattcactcttgtctccttttaacaacaaacttgttgattcagtttgtttctctttcttaaatggtaactgagagatgaaaggtttttatagatattttcgtttcatatccatttagggacaaaaggaagggttggcggaagttcaatttctcggtgttgttgagcacccgaatctcatcagactcattggatactgtgcagtgaatggtgaaagagagatcccgcgtcttctggtgtacgagtttatgcaaaataagagcttagagtatcatcttttccaaagggcattcccacctcttccctggaaaacaagattacagataatacttggagcagcacaaggattagcatatctgcacgagggattggcagttcaggttcctttctgaaagactaacgttgcttcttcttcttcttctt

SEQ ID NO: 13742 - DNA, 654 bp, Gossypium hirsutum
ttacacctcacggttactttgctcaggacaatgttttggggtatcccgacaccggtggccaggttagcaattacgagatttcaatgttgtaattcgtgtataaaacaagtttgttaaatctaaatctttcgactctcccatgcaggttgtttacatcttggatcaagtccgtgccttggagaacgaaatgctcaaccgtatcaagcaacaaggactcaacattacccctcgtattctcatcgtgagtgttcatgatctttcgattcggttttgtttgatttcggctgttattcatgcttacagtatatctcttttgaaccttttctagattactcgacttctccctgatgccgtgggaacaacttgcggtcaacggctcgagaaagtatacgggacggagtactcggatattcttcgaatacccttcagaacagagaagggaatcgtacgtagatggatctcgagatttgaagtctggccttacttggaaacttacactgaggtgagccatatgaaccattaattttctggcattagtttacccccatttctttgatttcatttaccgagtataatctctctttgttttaaggatgttgctcatgagatttcaaaagagttgcaaggcaagcccgatttaatcatcggaaacta

SEQ ID NO: 13743 - DNA, 671 bp, Gossypium hirsutum
ataatttcttgaagtaggcccagcctccatgtgtaaccttaaagtaattattacatcttttactaaacttatgtaactttatttaaactatctcactttgttatataatttataataaattaagatatttatgggatttttttaattccttggatttcggataaaacccttaaatgcttgataaaggagcaaagtctttcctttatatgttcttaattctttggattttaactcttaaatttatattttttatcaagattactgatatttcatatcatacgtgtagaggaaagagaaaggtggatgatgtttttatatttacatacaattgaatggttgatatatatatataaagaaagaagggttagggaagtgtggaagcgaggtgaaaagaaaacccctagaaacaaggcgaggaaaggtgaagaaggatagtgggggcgtgagcatgacccaacataagcatcatgcattcaaactttcccttgttgcagattatgacaataataatagtttttctttccctgtgttgggtttcgcatagagttgtgatgcctaatcttggagggtgcaaagccgacaaaatttacatcaagcaaaagcagaaaaagaaaacgagaacctgctaatttaggcacatttgtgcgagttcaagtgtctgaatcatggag

SEQ ID NO: 13744 - DNA, 549 bp, Gossypium hirsutum
ccttcaaaggaaagaccataggaaatatcaatttagaaaataatgtttttagaaagtttaaaattttcttaacatcgagccttgtaatatctatatcaataagttcttaatcaaaattatacatgtgttttgtataaggagattaaaatcgattcaactttctaccaaattaccttctccgctatcctcaaagcccgaattgctttctaggcgggctcaaataacacgaactaagtgcacaaaatcaaaactttacttaactttcagtgagagttaattcactctataaccgaaaattatgaatttttctcgaaaaatatagtttattattactatttttcaatagaataacgttgctctcaaagttatctcatagttcttatttataaagaaacagtacaagagtttcattcgaataagatttaattaaataatgatattttaataaaaaatacaataatttctacttgaagtagaaccagggggcgataatatgccctagaaaatactaaggtttgctgacccttacattaactaggccaatcataa

SEQ ID NO: 13745 - DNA, 585 bp, Gossypium hirsutum
tttctttgatgctcgttgcccgccttcacttcgcctcaccagtacttactacttactgcctacttggctttaccaggtctggggattccattaattgatgggtttctttagttctccttggtggtttggatggctctttttatgcccaatagttcttttgtggcatgtttcacagctcttgtctccaacctcaaaatggggaactcagccactgcagggtctatcttctcagggtattttatagctcaatataggatgccaagttactgtattttcatacattatactagtttgtttgttcaagttattgaaataatttgaaggaaaaaaaatgcaatagtataattcaaatataaactgtattttgctagttcaaagggaatagatttcgttattgtttttatcgaaatgtatcactgcaaatattattggcataatataatataaatcttatttagttaatttgaaaggattatttatgtatacaagccttattttggttaattggaacggttttttatttgtacatctaaaatggtaagtaaaaatgcaataataataaggcaattacaaaagcgaagtgga

SEQ ID NO: 13746 - DNA, 737 bp, Gossypium hirsutum
  misc_feature (60)..(60): n is a, c, g, or t
  misc_feature (63)..(63): n is a, c, g, or t
  misc_feature (66)..(66): n is a, c, g, or t
  misc_feature (624)..(629): n is a, c, g, or t
  misc_feature (635)..(638): n is a, c, g, or t
  misc_feature (645)..(651): n is a, c, g, or t
  misc_feature (654)..(655): n is a, c, g, or t
  misc_feature (663)..(663): n is a, c, g, or t
  misc_feature (665)..(666): n is a, c, g, or t
  misc_feature (668)..(669): n is a, c, g, or t
  misc_feature (672)..(672): n is a, c, g, or t
  misc_feature (677)..(688): n is a, c, g, or t
  misc_feature (690)..(690): n is a, c, g, or t
  misc_feature (692)..(693): n is a, c, g, or t
  misc_feature (697)..(697): n is a, c, g, or t
  misc_feature (699)..(703): n is a, c, g, or t
  misc_feature (709)..(709): n is a, c, g, or t
  misc_feature (714)..(721): n is a, c, g, or t
ctataatttatttcagttactaattttggtttttaaatttttagattttattttcataanatntantgtagtttatggattttgaatattattaggtaaattttaaaatttttccataaatatttataaaaaaaattaagttagaataaatgattgagaaatcatttttatattttaaatataaaacatttagtttaatgccataaaatttaaaattaattataaactaaataaaaaatagtattttattcaattaggaacttgtaaaaatatattattagttaaatatgatttactataattttacataccctgattaagtaatcaaatatcaataaaaaatttatggacttcactttaatatcaatttaaacttactatgacattgtaaaggattaaattatactaaattaaaatatatatagattaaaacttaatttcagcataacagaggaactaaaatcagaattagaccttttgtatttgatattcatgtgaatgatgtttggaattgcagaatatggactgggaaaggaagtatccacattcggtgatgtgtacagctacggcgtcgttttaatggagctttttactggcaaaagaccccctgacagcatgtttaannnnnncccccnnnncctcccnnnnnnntannacatcccntnntnnttntccannnnnnnnnnnncnanntctntnnnnnttaatntcttnnnnnnnnttctcttttccttcct

SEQ ID NO: 13747 - DNA, 680 bp, Gossypium hirsutum
ttgttggaagcctgttgagtagaaagacggcaggatgtgcagcttctgcccagtactcttttggcaaacacttctcaaataataaacatctaatcatcttttttatggtacgattcttcctctcactaactctattctattgtggagtatatgaaaaagtgagttggtgttcaatcccaacttcttcacaaaacaaattgaattgatcaaatgtgtaccccttgtcattatcagactttaaaccttgaatcttaaagccacttcaagtttcaacccattgcttaaatttccagaacataccagcaacctctaacttatttaaggaaataaatcaagcacatcctagtatagtcgtcaataaaaactatgtaatacttactctgagtgatgtgaggtccagtttggtctgtgtggattaatttcagtttttcagtagctttctaggttgctttttttgaatggaagtcttgctagcttaccaaattgacaagttttccaatttggtatattagcttcaaggtgaggcagaccctgaaccaaatccttctttcataggtttattaaagcaacatgattgaaaagcctaaaccttttgtgctacacttctgcattgatcttagctacagcataggctttttgcttctgctctaaataatccagagtaaatctctttcccttca

SEQ ID NO: 13748 - DNA, 647 bp, Gossypium hirsutum
gattttatgtactgaattattacaagccaaagtgaaaaaataaaatgcaagaaaaaagaacaattattcttactctgatgagtaataaatttataggcagaatgatttttttaacctaaaactatatgaaaaatccatattagcttttatttaacctttcaatgattaattttttttattgttaaaaatagataaaaataataatagttctttttctacaaggaatcaataaaaaagtgataaaaaaaaagaggtggcggttgtttggaggccggctcacatataataaggggaaagttagaggaaagaactaagaaaggaagagaggaggagaagggactagagaataagttatctggtggaatactttaggaaaggagatccctgatatttcatgtgttgaaatatatataggggagattctcttgtcatatagtgctatattaccgacaatacgagtggtaggctgcttatgtagttagttaagtaacaggtctattatatgctagttgttctcaattatagtaatttgtaattttgttctaacattctttttattgagttagtacaaaattttatacttgagttgtttttcaataatcccctaaaacataaaagtaagtgaccaaaaacggatgacttgttgg

SEQ ID NO: 13749 - DNA, 695 bp, Gossypium hirsutum
  misc_feature (41)..(41): n is a, c, g, or t
  misc_feature (45)..(46): n is a, c, g, or t
tatatgtaggtggagcccctcataggtgaggaggagagtangtgnntctctctggacttctctacctgcttcttcgcgttgcatcttgggttcgtgcacttgtaatagctcctgtttcatcccaatttaaaggaaaacccacttacttaatatggaaactttcagaacaataactaagcaagcagatttctattaggttgagagagagagagagagagagagagaggaaaaagacagtgaccttggattagggctgtttttgatggatttttggccatatttcctccatttatatccatcatcagccatgccattgccacagcttctgacctttagagtatacttactctctattttactcaaatttctttccagcattgatttaatcctgtcgaaaaacaaatattttgttaatttaattaagatcaaatgaaacattaatcattagctcaaagaaagatccaagggaagaccaaactaacctagtggtctgctggggttgatccttccagtttgacactgatgataaagcattctcaatatcttcgatcctcggccctgaatacacattggacagacgttgtttactgacctcttcttctgaagttatcgctttgggctgaattgtaccttgagataggacaaagaaaagtgactcctcatcaagactctctcttacaagttccctcgtggga

SEQ ID NO: 13750 - DNA, 595 bp, Gossypium hirsutum
  misc_feature (34)..(37): n is a, c, g, or t
ttgaaatgtcctgttttatatgtaattaagaagnnnnttgttattaaaatgctaaaagaataaacagtgtaatcatgttagctccaattgcaaatcacaatccctccctttgatttccaaacaagcaatccagatataagcaccataattcatgaacaccaacatgaacgctggctaataaatagctttcatgctgcattagatagccaactcattaccaacaagtgttaggtgcagtagtaaggcacattgcactcccaaaggagaacgcaagttcgaaccttggagatgacattattgagaacatgaagcgtaaaatagacaaggagaatacccaacaaaagaaaaaagatacccatctcattaatagctaatacattatcagtacaatgcacattgagttcctaagtagtacaatgtcaaccaaagaatgccagagaaaacaatgcaagaaatgcaaaggaaatgcaaaccgtgagtcatagaaaccaattacttataaactccattaaagggggagccgggaagtgggaatacaaaagatatactctttcttaatttcctattctccaaggacatggtaaagaaagggatg

SEQ ID NO: 13751 - DNA, 1076 bp, Gossypium hirsutum
  misc_feature (1045)..(1045): n is a, c, g, or t
  misc_feature (1062)..(1063): n is a, c, g, or t
  misc_feature (1065)..(1065): n is a, c, g, or t
  misc_feature (1068)..(1070): n is a, c, g, or t
aagagacaagtaaatgttgagtttttgtcccccccggggctgggaaaagaattatttatgaattatattttaaacactttggggaagaaaaatattttgtttgaagaggggggttaaaaattaagattttaaaataagtaaaataaataaataaatttcaaatgcacgatttcaaaatacgattttaatcaagatgacataattgtgttagattaattacattttttaacttagaattattaaactcatgtttatattgttacgaataaattcacggcaactcggtaatttgttaacttatgaacatactcacctaccaaaatccatttatctcttgactatatccctatgtcaattcaaccgattaaacaaattttaataggcaaatatgttattgcacatacatacttattaaattgaaataatctcttgtacatatccctcaagtgtacacaatcgcaacaagtaataaagtcacacgtaaatgtcgagttattgtacccacaaggactgtgaaaataattatttatgaatgcaattaaaaacactttggtgaagaaaaatattttgatttgaggatgttattaaaaaccctcagctaccttagatgattaaacaaaaataaatctcaaatgcacgatttcaaaatacgattttaatcaagatgacataattgtgttagattaattacatttcttaacttaaaattattaaactcatgtttatattgttacgaataagttcacggcaactcggtaatttgctaacttatgaacatactcacctaccaaaatccatttatctcttgactatatccctatgtcaattcaaccgattaaacaaatcttaataggcaaatatgttattgcacatacatacttattaaatcaaaataatctcttgtacatatccctatgtcaattcaaacaattaactcgatttaataagcacataaaagactatgggaggtaacaaagtatccttaccttgaaacagtttaatcacaataatcttgcaagttatgcaaggcaaatgtatcgtcaantaccgttgctaatctanncntcnnntacctt

SEQ ID NO: 13752 - DNA, 664 bp, Gossypium hirsutum
ccttcaccggttttgaagcccttcgatcacttttttccactgccatgctctttgtttcgcatcatcaaatgatagcaccttttttggctgaagcaccataaatcagaaaaagcacaaaagcatagccacaattgaaatgtaaaggttaaaatgtgttgttagcccctgtacttgtataggatttgagatttggcccctgtaccaagttaaaaatttaatcctcctaccttttcaatttaaaatttctagttcaattattaccattgtcgttggtagtttctatcaaattttgtcaatttaacatttatttctgtgaatcatatgctacggcatatgagaaaaatcaaatcagaattccaaattgataagttctgacagtaaatacttacgattttaatgactgcactgagatttttaaatcaaaaaagtagaatgacctaatttttaactttttaagtataatgactaaatctcaaattttgtcaaagtacaagtataatgactaaatctcaaattttgtcaaagtacagggactaacagcatattttaaccaagtataaatcctttatctttcattattcacacctatgataaccatataatattttgatcaaccataaaacagtcccagtgttgagaaaaatggaacacaaagagccaatgt

SEQ ID NO: 13753 - DNA, 410 bp, Gossypium hirsutum
atttgtctcctaccgatgtttaaattgaaagtcggaaagaaaaagatgtaacatagacaaaaagttcgggagagctctagttcctgaatatcgactgatgaaatttgttagtcaaatatccgcatccatgatatcctagaagtaagcaacagaagccagaagaagtaatgatgatccatctcgagcaccagagggctatgtccctgaaatcaagatgaaatgaagaaaacattttattatgataaaagcactcctttaacagttttgacacaatagaaggtgtgatcatcacgcacacaagagtaaacaaagaatcaagcattgcaacttttcaaaagaaagatcatattgccatactacaaaccttgaacactaaattcttaaaggccaatttcccttggtaagtttat

SEQ ID NO: 13754 - DNA, 629 bp, Gossypium hirsutum
cactgttgacagttagggagcaggcgactaaccaacatgtgatttggatgaaatgggactccaatcttttgtggcaacctaaggcaagattcatgaaatatatccctgcagcctctttcagcgcaaaaataggctgggcctaagatttgcaagttacaaaagctgcattttatgtcatatacagattcataacaattggcaaggacaagtttatgggggtgggtgaaatggtgcaactcagttactctacccgtcattttctcttctaaaaccccaattttatgagttgttagagctgcacattttatatcaagcttgaaattacactgctcacaaaagtatatgaagccatcagcccatcacaaatgtctctacactcatcacatgcaataaactgatgatgccaaacatttgaagtatagaggttaagagggtggctagaatgaaaagggtgtcttatctcatatgacaatttagcacatttttcatgtaggtaaaaaacacatatcgtgcaggagtagcctgaaccattaagtaccagacgacaaccgttgcaataaattttttctcctaactctgcagttattttatacatcccgtgagggtgggtggtaggttgaaacaaactc

SEQ ID NO: 13755 - DNA, 673 bp, Gossypium hirsutum
gacataacgaatgctattgcggccattgcaggtatcgcggtcatgaatttttcacataacttattgtaaaacaataatagcagtttcggcggtagcggtttcggacggtgccgttaccgctgtataacggccgctatagcggtagcggaccgctatttaaatccctgttaccacccctcttccattgcttccaaatgcgaactcatctgaatcaacttcacacattggaatatcagccctaccacctcatccggcggctatgactccggagtccacatcccatcggctaaaacttcctccttaaaacccatggggtttgcggtgacaggactgaaagtgggggaaattggtcaggtattgtagatttggaaccccgcaaaccactttgggtcagtaacaatctgacaacactcattcaacaatctgtatatgttttgaaaatgactgctttttttctcttccccaactattgactgacggcttagcaaattttaacagtagggaaagaataaaagatggataacatgtctgctttatgggtgtttttgcatcagattatttgtctgcaacaaataaaatctatttgatctcacaaaatgaaaaaaaaactcacagagaaaatcagtgaatgtactgcattttgttatagtttcaaccatagccgtatgtatgc

SEQ ID NO: 13756 - DNA, 523 bp, Gossypium hirsutum
tggaacaaggcaggactaatttgatgcaataaaactgaggtttcccgagctgtataaatgaagaaattaatacaagttggatgagaaaacgtatcaccaaatagggggtatgctgtgcgaagttcgatatggatcaaggtagaattaacaaaaaagaatttagagaccaacttaaggtgatatcaactcgtttaaacgatttttttgaatctttcgaactatttatcattttttattcaacttaatttaaaatttaatcgaaacctaatataattgcgggtggacagctaacagctagctagcctttgtgaagacataattagttaggatgggggatgaccccttccatttgcatttattggatggctttcgaaaggcaattaaagggtccacgaactctcttcacgtttttcaattatgcatgacatttatattttgaccaaaccctgtgtttttcacaacctatacctctgtcctactggtaaatttgatttttgaccggtcccacttcactccacttata

SEQ ID NO: 13757 - DNA, 612 bp, Gossypium hirsutum
cttacaggcaaccttcccaacttaaaaccagtgaccctttgcacaattacttgatcatcctcagtcatactagcagcaaagatctgtcttagaaacattaagttgcaaatcagaaaaatagtagaactcttgaaggatgcaccaaataccaataactaaattaattgtgccctttgcaaaaataagatcatcaacaaatgaaagatgagtaagatgaactctaagacaattaggatgaaacttgaaaactccttgcatcactgccctatccaacaattttgaaagaatactcttaatgataccttattccctttacacctctaaaaaaccacaacaaacctccattaatgtaaaataaaactgtgttgcactttttactgaacttagaaaatatcactctaataataatttaattttattggttgtggttgagcaaaagtcagtgcaaactaacttaattcatacattcaattttatcagtttttattaaattaattattttagataattcgatttaaagttaaattaaattgatcaatcatttgttaatgaaatattgacagacttaacttatttcatacattcgcttttgtaaacctgtcgagtgttggt

SEQ ID NO: 13758 - DNA, 621 bp, Gossypium hirsutum
tgggcttgtagttggagctgccatctcctcttgcataggcagcatttgagattaatgttgaagaattcttgttgccgtgtttggcttggggatttgtgggcactagaatggcttcacagtgcccgcatgaactgcatcttctctcacaccttggcggccttgaacctatctgagctctcaatatcgttttttcttcatttaccatctattccaaagtaacaaggttaaagaaacattctcagcattggttttttgttccatttatgagaatttgagtgcttgctagctagctcaccttggagaagctattggatttggggtttgatctacctgcaaaaacaagtagggacacgaagattacttcaaattgaaccaagtactcggaactatttaaaacttatattaccttcaactttgtctctcacttgcgttgagcttaaaatcagaagaaaaagaagggaaaaatagcatggtctccggcaagatatgaaaccgtgacttaaaattctcattttgacgaaaaggacaaggaaacggaaggcaaaggactcggggaagagtagagacttttaacttatataaagcatttcaaaaggggggttggataatggaagtatggaa

SEQ ID NO: 13759 - DNA, 614 bp, Gossypium hirsutum
  misc_feature (594)..(599): n is a, c, g, or t
taaaaaacaaaattttaaaaaaaatattaaaaaagaatgagggtacatgaatgagagaaatcccttttttagcttttctttcttttgtgtaacgcttttattaaaaacccagcctttttgccagttttcatgaagttttcctcgtattttttttgtcctccctctctcccacgtgactcatcctctctcttcctatgtgttttgtttttaaatcaaaataaattttttggacattcctgagagggaactaaagcggccatggatagggaagaatatctaagtctgctctatctatatctctctctttctcttctgtacaaccttaaaagttgtccgaaaaccagacacccaaattgagaaactgagttttgaaacttttcgggaagagggttcttgagttcatcatcaattatctgaggtaggactgttggggtatcaatttgttctttcttttctttttttgggttagcaaaagggtaccaaaatctctgctttagctagagaggattagtaaaaagaaaggagaaaatttgccttttatggttactataatgagggacttcccttcttggttccgcgaaaacggggttcaannnnnngattcatcgtaaaaa

SEQ ID NO: 13760 - DNA, 627 bp, Gossypium hirsutum
tccatgtaggttatctgtttcctcttaacaagttcattatttctcaagatccatgacgttgcgtatccaaattttttagacctttattgcgataggacgggtgataaaatatcggcctatttcggacgtaaaatatctgatccatgtatctctttcatagttttgtagtaacttgcaaatataaatttggaggaaaatgagtaaaaatatcttaaataatctaacggtagattagtaacctggacatcgaaaaagaataaaataatttgttttaattaatttggtaaaataagaaaaaatgacgagaatcttttatttatttatttctcgctgtctcaaggtaaaatactcgactgatctttccaatttctattttcacaaatatgtatgagatgagaagaagacaaaacgttttccgtagaaaactctttgctgactgacataatgaaatcaggtaaattctgctctcttttttttaagtctatgtatttttcatacatttgaactttagaactttagttccttacaaggaatttaagtctttttactttttagattaaaaaatataagtctaaattaaattctaatattattcttttagttaaatggctgccaattgtatgtttc

SEQ ID NO: 13761 - DNA, 386 bp, Gossypium hirsutum
tgaaataaaaaaattaaatattaaaatggtatgccaatatcattatttattaaaatggtatgtttgaaccagtaataaaggacatctctcccctacatccttaaattttttgtttttaaaacacatatcattttgtaacgatgattcaacgagtgtatcagaaaaattataagtgtcgcccatttctcttcttccaccccttgttgctttttcaaacataccattttgataaataatggtattagcatattatttcagtatttaaattttttttatttgcattatacaagtaaaaaaacctaaaattgcactttgttttgccatcacattttcaaaatttgatagggaaattataatttcggatagggatgagcatctgatcgaat

SEQ ID NO: 13762 - DNA, 646 bp, Gossypium hirsutum
aaggggttggttaatccaattaaattaatttggtttagtgggtttgaaatttgggaggcaagaagtctagcggatcacacaagagcaactattaggagctaaaacccatactctcaaagcctagtttgagtcgagagagaagtaggtgctaatttaaattcactttcttcaccttagttattattcctttaaaaattatagttattgttagtttataattgaaattttaaaatttataaaatattaaattaaaaggtaaccaaatacacataatttcataatttaacttttttaaaatgctatcaactatgcaaaattagccatatctttgttgaatttttccacatcatttacttgtaactgatctcagcataggacactattggtgaaaagtcccgtttatgaacttccagaataaacaacttaaacaatgtctattgcatcaagaaaaaaaaaacaccttacaagtgtcatctagtaaaatttattatatatatttttttgtttttaaactaatttttaattttagcataaaatattaggatatatatatccaaaagccttaccttagtatatgacttcacaaacaaaattgctaacaacaatttttgtttatgcaagggaagtccatactccacccctacta

SEQ ID NO: 13763 - DNA, 453 bp, Gossypium hirsutum
ttaaatgcgcacatgttgtggcaggggcagggtcggtcaaatcatccgcaggtacataaactgcttgaatagaagttatggatccctccttggtagaagtaattctttcttgtaaagtacccatttcggtactaagggtgggttgataacccacagcggaaggcattctacccaataaggcagatacttcggatcccgcttggacaaaacggaagatattgtctataaatagaagtacgtcttgttcattaacatctcggaaatattccgccatagttagggcagtcaatccaactctcatacgagctcctggcggttcattcatctgaccgtagactaaagccacttttgattccgcaagattttgttcattaattactccagattctttcatttccatgtaaagatcatttccttcacgagtccgttcacctactccgccaaatacggata

SEQ ID NO: 13764 - DNA, 652 bp, Gossypium hirsutum
gaagacgtccaactttattgctcctacaatatagtagtaaaaatattatttaatagagattaattaatatttgacacaattcataaatttaaaatacctcgtcctcagctgcacaagcaaaactttttaacccagctatgtgcgtgaatttttgtttttgcctacttgtagttccaacacgctcacgatcctacattatgaaattattattacttatatagtagatactataattatacgagtttgaaagtatgtaatacctcttcattctttgaattccaaaatctaactacatcttcttattggtacttcagcattcacagcggtatatttcgcaatttctcttcgagacttatatttttcttaaaatattccttctttaaagtacttttatggtctctgcattttttcctaatgccttcttgacataattatccaagacctctaaagcaaatctctcctgtaaaaaacacaagtttagaaagtaaatataaatgaaacttaaacaaagtattataaattacattcacgttattaccttaatattatcgagagcttgatttttgttactatcaggcatatgatgccatgactcgtagttgatgggaaacagattggcatttcgtgctataatggccaagtatcccgctaa

SEQ ID NO: 13765 - DNA, 654 bp, Gossypium hirsutum
cttgcttcttcatttcctggagttgctgatcattggtaggtgcaatttgcttttttttggcagattatttgttatttttttcaccaaaaaaataatttatctattgtccgagtgggtgaaaataaaaccatgattaacatatattttttttaaaaatagatagtttcactaacatttttgaaagaagtataatcatataaacagggtgaagcgagaattttttgttggaaggactaaatttgattcataaatttttgggagagctaaaaatttaattccgtcattaaaattttaaaatttttcaagggattaaattataacctttacacttttagaggggccataattaaattttaaattttagtgaggctaaaatacaacttcgatggtatgtcgatggctcaatgttcttgtgatgttaacgttggaaggattaactaacttatctgccaatgccttgtactgaaacttttaggcagttcaatcacgggattattaatataattcgacatatttccgttctgtttggatataatagaggtgcttatggtcgaatcaggtttaaaaatgatattaatatattttgttcttactcaagcttgatccggtctaaaatataggttaaaatttgttcgaatccgtccatatttgcaa

SEQ ID NO: 13766 - DNA, 503 bp, Gossypium hirsutum
tatgccaggtatgcgtcagttttaacatattagagatcaagatttacaaacaaacttgttaccaactttatctgtcaatatctcctagtcttccatgttgggttctaatagcaagttatgtgatgcagacggtaattggagcaattcttcttgttcacttgcacgccactgattcactaacaaaaacccaagcgtggtttgtcgtgttactggtgtgtttgtttgtaatggcctttgcctggtcatggggtcctcttggttgactgatacctagtgaaaccttctctctcgagacaagaacagccgaatttgcctttgcagttagctccaacatgctattcaccttcatcatagctcaagcattgttcttgttaccggaggcgaaagatgtgcccattgatgccatggtagacagggtctggaatagacgccctatttggaaagagttcatgattgatgagaattgaagtagaagtagctcaaagccaacaaattcagagatg

SEQ ID NO: 13767 - DNA, 619 bp, Gossypium hirsutum
tctatcaattaaacaaaatcaaggtgttttaccgagcaggttggtccaagtatcttggtgaatcttgtgcaggcaccctttagattaccgatatatatatatgtacgtacctacatataaaagatggagactggagaggaaatggttggttttcactattctgatcatgtgaagatgagcttcataactcccattaaaggtgcgaaagagacctattagaacacaacttaagaaagataaaaaggtgggaaacaagggtactggaattggacatgacatgcattattgttgataaagcatcaaacccaccttttattttcagcctttttcaattgtgctagtagtagtcatataaaagttaaagctgcttctcacatgctcttcttttgcttttagagctgtgcgatctaagttagtgtagagttggatttcggaggttatcactcaccaaacattcttgataccacagctcaccatatcttcattcttatccttgcaatcgtactctatacctagctatcatgcttcaattcttaattttttaaaacaaaaactcgtgccccctacctttttagacatgtgaaattaaaatatacttatcttgagcatatacccgacg

SEQ ID NO: 13768 - DNA, 456 bp, Gossypium hirsutum
gcatgaaagtcataccatgtaggcatgaactataggactaaataaatgaaccctatttttcaaaattttgaatttaattgataccctaggtcattgagagttgttttatggtgacaagattaatacaaatgattcctatggcacaagcagccgatattttgtccatggcaaaatgcagtaacgagctccactactacctgaaagggaaaaaaacatataaacagaggggatgcactgggaagaagaggaagcaagggactaagcatttagacgaacggttggtgaacagaaataaggtagacacgataactgcagattcgtcgtcaataccaacacacacctatatgatgatgatgatgatgatgatgatgatgacgacgacgatgatgatgatgatgatgatgatgttattagcctttgaagccctcggccaacccaacccgaatcttaagactt

SEQ ID NO: 13769 - DNA, 677 bp, Gossypium hirsutum
gatttgctacttcaacttgtccattagtttaaggatggtatggggtggctgttctatgatgaactccgtatttcttaagggttttttcaaattgggtattacaaaaatgagtgcctctatcactgataattgctctaggtgtttcgaatctcgagaagagttttttaacgaaacgtactaccactctagtgtcattagtaggtagagcttgggcttctacccatttggacatgtagtcaactgctactaagatgtatttatttctgaatgaactagggaatgggcccatgaaatcgatccccaagatcacatcaaattcaccaaatgacaataacatcaagtcagctggaaagcaataaccttttactatcaacggacagtcttatagactttatccatcataacacactagcccaaggggtttgaaactttaaccacaaatttagtgaattaaacaggtaaatttctaacggacactaggtttatgcataggtatgaatgtatggaaccaggatcaatcaaagtagtaatatcagtatcaagtaaagaaaatgtaccagtaatgacgtctggtatagaggcatcttctctagcacaaatagcatatgttctcacaggtgctcgtgcgtcagatctaactacagtatcctcgatagtacctcgacgacccacaatat

SEQ ID NO: 13770 - DNA, 640 bp, Gossypium hirsutum
attttgcaaaatggttgagattagggtttttccatgaaagcatatgtgtagttttctaaaattttatgaaagaatatgagtattatatgtgtaataaacaacttttatgaagggatttttcatgaaaaccctataggggctattttgcaaaagttggaaatctgttgataaatgtaagaaataatggaaattttggatcgcttctaatatgaaaagcaatcagctaggcttataatatgaagaaattcgataaaaattaatttttgagcataggggtaaaatggtcattttgtgaaagtctaggggcaaaatagtcatttttccaaattatgaactttcgggcgtctaaattgatatgctgatgaaataaatgaattttattaatttagatcaagagaaacgtgattcgggtcttgatcagggtaagaacaaagtttatgaggattaagcttgtcttcatcattttgtatcgaggtaagtacatatgtaaataatgtgttattgaagcttactttggtatattttaataatatacacgtgtaattagcttattattgttatgtctctaaattttaattgttgccatgaatgtttaaatgacatgttatgcgaataaattacaatgtgagcaaaataacga

SEQ ID NO: 13771 - DNA, 563 bp, Gossypium hirsutum
cactagaaagtgaccaggagtccagaagcttaccttgctgttatgtagctaaaaatctagattgtcaaccagatttcccatctgcatcaatcacaaattgagaaatatgacaagaggattctaacacatattgctgccgccctaacacatattgctgcagcccatacccttcgagacgagcacaatttgatgtttccacaacagaaaattattctcagtgagcttaaccgtatcatgtatggaaaattgctgaattcttttgaccaatcgacatgaacttgccactcgatctgaattaggagtgtaaagtcagtcaccagcattcggggaagaatttccaccatgaccagaatctacttctggaaccattaagactgatctttcaaagatggaaccaagaaagattatcaccactaagaaacaaagtaaacctctctactgagccaaaaaaagagcaggcactattaccatgtttaaatctacaacaaagaaaactcaactaaagaaaacaggatctacttcttttattgatttgaactctaataatcccaataggaccgagc

SEQ ID NO: 13772 - DNA, 656 bp, Gossypium hirsutum
cggaaatgatattttgaatgtaaacatatgaatggtaagtatatgtgtatgaaacatatgattcaaatggatttagatatgcttaaaataatatgtattaagttgttatgaatgtcaatgaaattaatcaaagtattcgaactaaagtttaagatgagttaaatgatatttgttggtccttaaattaattaaattatgtaaatggtaagtttgagttaaatgttgcaaagctaggaaactacttctgaagtcgtgacattacttctttaatgttgaaacattgagcttatgtttccatggtcgggattccccttgttgaagtcacgacattgaattcccttacgtttaacgtcatgacgtcccttgtaaatgccaacctcctattttcaaagtcgagacactactttattgaagtcacgacattgagtttctacctttggtatcgcgatgtgattctcttatggccatgacgtcaactcgatattttgaaaaaaattatattttagtccctcaatcaacatcggttcatcataaaaggttctgtaagctcgtttataacatgaatttgattaaataacatattacaattaagaattgaatctaatgccttgcctaatttatttatttgatatgcaaataaagttgtagttgcttca

SEQ ID NO: 13773 - DNA, 459 bp, Gossypium hirsutum
tctcctcggtgtagctactatctcttttagtggcgaataattttcagagaaaactcgatacgaaaccctatccaccttccagaagtgactgtggcaccatgcgagtaggagttgcgcacatctgatgaatctaccgtcacccgctttccggcatacattcagtgacctgaaggtttctgccaaaattgctaggactggtgtaaccctcttatcaagccggtcaaataaatcggtgattgcttcatcaacatacccaaaggctttgggaaaaacaactaagccgtatatactcaaagcaaagacatctaccctcttcctcacatctggatgtgctagaattagatccttcaaactcttccaaggaatgcacttgctatcccctttctgcttgatccgtgctgcaacccactgctcgctcatccctgttatattcatcaacttcttcaaaaaagttggcac

SEQ ID NO: 13774 - DNA, 652 bp, Gossypium hirsutum
cttacacctattatcaatataatggaaaatctgtgacaatacaaagagaaaaattgagtgtaaataagaataaattaattctagtgggaggatagagagaagaagtaaatagaacaatgattataactcatgtcctaaagctttcttttttgctagtgcttgttcatacttctggatgaataccacaagtactgaatatgcgtacaagtcctttattttattttttgttttgaggtgggggaatggagcaccaaggaaacactaatcttgaaggtcacttttgtcagccatgagcataggatctaaaagaaacaacatgatacagggcgtgtatgtgccacaataatgtcaaggtacacacaggacatgtatgataattatggatgaaacagaaatgtgttaaacaggaagtaaattaatttaatttacattacattctaatgcaaagcaaagtttcaaaggcttcatgagatcataagcctattctaccatagggaagtagtcctggaaagagttagtaattacagacattagtagaaattagttgaaaccaagagaatctaaaagagagaatgtttccacaaacatgttggaggtccattggtttggcagggtaggtaggcaaaaaggataagcatgttctatgtgtgag

SEQ ID NO: 13775 - DNA, 465 bp, Gossypium hirsutum
aatcttagtgtggtaacactttaaagaagaagaagaaataattcacagtaaattaaagtgatgaagaatcaagaggtgaagattctaaggataaggatcacgttaacaactatgtgggctttataactacttttggttatcatgttacaacattgtttgtgtttgttcgtaaggattattttaaaagtgattgtgattattcttttggtagcattgaagaggcctataggaagatgatgagcttacccaaagtaaaagataggaagaaaaccaaaagcttcttattgcatcaaaataaaaagatagtgaacttacccaaagtgaagcaaaacttaacacagttttgaaggagcttgatgctacaaaaaagattctcaagaggcttggtacttaaaatgacatgcttgacaaaattttagggactagaagaatcaaatctagccactatggtctgggatataagga

SEQ ID NO: 13776 - DNA, 490 bp, Gossypium hirsutum
cggcccgcgtttcctggcgtccatgttataaaggctgcgggtactacttccatgggagaataatcatgtcaccaactaaactataaaaataaaaataaaaataaaaatcaaagcaacattcatcaatttcttctttgaagcagcagagtttcataggctaaaaaaaacacgatactgtaactaaaatattgtaccatggtgtcttaaatcttctctctcttttagtagtgcatcttgtgagctttacaatcaatttttgaattgcttgctactctgcaaattgtaagcatacttctcattattgattaagaaaagcaacattcttattgttaagcaaagaaaacctcatctttcctatttagtttctttcttttctattaattaggtaatttttatgatagaatagtttcttccatttaattgtgtttatttaatgaatataaatttaattaattaatttaattgaatctaagttgtggtcaattaatca

SEQ ID NO: 13777 - DNA, 613 bp, Gossypium hirsutum
  misc_feature (32)..(32): n is a, c, g, or t
atgttatattcactgtaaaggataacagtccnataggagcagtgctaataggccgagcttatttgcctgtcaaagatattattgtagccaatggggctaccgtgacttgcaatcttaaaatacaggatgaggagcgcaaggcactacctggacagccacaaatccgtgttgcattgcagtttcaaagtgttatccaggaggaaagttggggtgtgggaattaaaaccccgggttttgagggagttccttacactttctttcgacagcgacagggctgcaaagttactctgtatcaagatgccaatatctccgatggtttcaagcctgacatacctgggatgacttatgaccctcgaagatgttgggaagacatctatgatgcaattaataatgcccaacacttcatttatataaccggttggtctgtttacactgagataactttgataagggatccaaagaaagaaaagcctggaagtgatgaaacacttgggaacctgcttttgaagaaggccaaggaaggggtgaaagttcttttgcttgtttgggatgatagaacttccattgaattgctgaaacaggaaggcttgatgtcaacccatgacgaagaaac

SEQ ID NO: 13778 - DNA, 624 bp, Gossypium hirsutum
cttgtctatacgtattacattgaaagatcttgaatttgaaccatttaaccacttcaaaatgacatgacactatttgtcttacatgtcatatcaataaatagtttaataattatgaaaaataaaaataaaattcaaaaaaattgtaaaaagttttaaaaagtagcatgaaatatatttagattgccatacatgttgtcatattttaaaattaatattttagatagtatttttgttaagaaaaacaatttaacttaaaggtcaaatttgactttttcaaaagaaaaaaaaatcaaatttaactattaaaaaaatcaaattgataaaaatgtaaacataaaaaaataaatttaatattttttatttgaattcaaaatcaaaccagtaaaagtaaaactttctaaatattatttttttaagtaataaaaaaggaataatggtattgtcttcaacagttcacgtggcgccttcgacgctattccccatacaataaatattacagcctttataaatctgcttcagaagtccaacaaataagatcgatccaaagaaaaaaaaaaaaatccaacaaataaggaaaaccctaaaaaagtttatggaaaatcaccggcaagggcaataaaaaat

SEQ ID NO: 13779 - DNA, 409 bp, Gossypium hirsutum
gattgcgacctgatgacaagttactacaaaaagacgttaagttcgagtggtcagaaaagtgtcagaaaagttttgatcagttgaaagttcttttgaccgaagctccagtcttagttcagccagaatcgggtaaagagtttgttatttatagtgatgcatctttaaatggtttgggctgtgttttgatgcaggaaggcaaagttgtagcctatgcctcgagacagttaaagccgcatgaaaagaactatccgactcacgatctggaattggccgctattgtatttgcgttgaaaatatggcgccactatctgtttggagaaaaatgtcatgtttattccgatcacaaaagcctgaaatatttgatgactcagaaagatctgaatttgagacagcgtcgatggttagaatt

SEQ ID NO: 13780 - DNA, 658 bp, Gossypium hirsutum
cataatgatgtggaagtttcgaggttgctgtggaatattatgaaaatactacttcattcataattagtatattaatgtaaatagtttagaattaaacacgatgagaaaacaaggcaacgttctgctcagtatagcttctctgtttcaatctttgaagaaatgagatgtgttcttaacagcatcctgacactaagaaactaaagaaaaatggttttttagtatataacctctactggcgtgtttgatcctcctcttttggggttgtcaatcccagtactcttttctcattgcagtaaggatactctagtgagcataatatcagttctgttgatatatgcatgctcttattgccttttaaactattgcagctaagttctatgatggacatgggaagtgatatccaagttcgtgtaagtgggggccttcttgctatattagagaatgaaaggattgtagatacccttgagcaaatggagtctaggactgcttcaattacaatcgattctgttgctgaaatttcattgtatcattttatatgaattgatcataatgctcacagcatctgttcttctgatttttcaagtcaaaatttacgttctatttggaaaaataacaatagatttagaaaccagaactcgatattgcattccttgacaac

SEQ ID NO: 13781 - DNA, 527 bp, Gossypium hirsutum
ttgatttttatgctcatggcctgtaaaagatattgagatgtgctggatttttacacaatattacagttagccccttttgctttggatggagaaagtctcgttcttggtatatttttgtcttgaatgccttgtctcttttttacagggagcaattggcaggaacagattgggcactagttaccacaaatgatgggaaaaaatattactacaacagcaaaaccaaggtagtgtgtctagtttaattcacaccactacctgttttattccaatgggcttgttttattgaattgtttgtctgaatctttttcgagataatagaacaatacattcactgataggatatgaatgagttttgtctggaattcagtgggctagaagttaaactataagggaccttatggtctatggttataaatgaaagagttctgcttgggaccggtagagctctaagaatcaagaagtggctgcaatgaggatcatggttgctgtaaaatttggggaacagaagacccagggctaatttgata

SEQ ID NO: 13782 - DNA, 660 bp, Gossypium hirsutum
tagacgtttttcaatgggataaatattgacaaatgatcaagactaaatgtggaaatttgataagaaattatttggtaatttgagtaatagaaatgaaaatttgaatcatgataaattcatttatgttttgttaatactcacatgaaataaagttgcatgtgaaactgagatatgtaaaaatatgtttgtaacaagatgaaaagttgaaatgtttgaatgaagtgtttgaatcaaggtgtataatactatgatgatgagtgatgaatttatctgtgtattcgaatatgaaactccctttcgaggcttaacgacctcacccccttaccagtgatatcattataaggtttcaatgaaacgaaatagaacgagtttggaaagaaagattaaagagttaaatagtgagataatgatattatctgagagaaatgattttagtttcaaatgatttgaataagaaactttggtgtgctctacgaacgatgaatacgtgattgatcttatcaatggatgattacatgttagctggattagaaattaaattaatgcactaagtgaattcgtgaagcttagaaaggtgttatcaagttataatttaaaaaggggttcagcttaaattgatttccgatttaaaatttcaaatgggaaagtgaagattgtttg

SEQ ID NO: 13783 - DNA, 685 bp, Gossypium hirsutum
atcgcaaagttaaagactcatcccctaactatttatcctgactctgatcaatccaagttggcttaacttgcaactcggccaacagactcccatcatcaaacaaactaaggagagcaaacatcaaccttagatcagacatcattctacgactgagagcatcggccaccacattggccttttcaggatgatactctatggtgcagtcataatctttaagtagctcaatctatcgactttgtctaagatttaaatccttctgagtgaggaggtacttgaggctcttgtgatcagtgtaaataatacacatctcaccatatagataatgcctccagattttcaatgcaaagactattatagccaactcaagatcgtacgccagatagttccctttgtgtatcttaagctgacgggatgcataagccacaatcttaccgtcctgtatcagaacgcaacctaaaccaacatgtgacacatcactgtaacacccctcacccgtattcaatgtaggaatagggatgcggagtattaccggacttataacacatttatacatactttttacatacatttaatcaatttatacaatcattattcaatctcaatcaatttgtccctaatacgagcttacaaggccaaaaatatgctttgggagtggtttgggactaaaccgataactcgagaaaaa

SEQ ID NO: 13784 - DNA, 640 bp, Gossypium hirsutum
tggtgctgtctgttatatgcttggtgactgtttgtggatattttgagtagtatgcatatatgggtgtttatggaaagctgtgttgacaaaattcttttatctgttttttcttattgcttcactaatcaccattgccgggcatttccttaagcttcagattactaacatcagaactggtatagggtgttcgatgtcacattgataacaggctaatcaattagaaaagggttaatacttcgcaacttaaacttggttggtattataagatatttcattttggattcgattggtatagaatgtgatgacattgaatcacgtgtcaagtattaataaaacaaataaagattttaaaaaaataaaaactattgtgttttgaaaatgaaactagataaacaattatttagattatatttagattctaatcatcaatttgatgagattcattttagatgatttctttttagtaattttatacatttttaatttttaattatgagttttcatgtttatattatcctaaaataaaaagaattttttaaatatataaatatttaaaaaaaattaaaattataaagttagaataaacatagatgcgatatgaatatatcatatggtatggtattgattgttagtgtcaccg

SEQ ID NO: 13785 - DNA, 709 bp, Gossypium hirsutum
  misc_feature (564)..(565): n is a, c, g, or t
  misc_feature (581)..(584): n is a, c, g, or t
  misc_feature (589)..(593): n is a, c, g, or t
  misc_feature (596)..(597): n is a, c, g, or t
  misc_feature (600)..(602): n is a, c, g, or t
  misc_feature (606)..(608): n is a, c, g, or t
  misc_feature (615)..(620): n is a, c, g, or t
  misc_feature (622)..(624): n is a, c, g, or t
  misc_feature (626)..(626): n is a, c, g, or t
  misc_feature (635)..(635): n is a, c, g, or t
  misc_feature (638)..(647): n is a, c, g, or t
  misc_feature (650)..(650): n is a, c, g, or t
  misc_feature (653)..(659): n is a, c, g, or t
  misc_feature (662)..(665): n is a, c, g, or t
  misc_feature (668)..(670): n is a, c, g, or t
  misc_feature (674)..(677): n is a, c, g, or t
  misc_feature (680)..(680): n is a, c, g, or t
  misc_feature (682)..(686): n is a, c, g, or t
  misc_feature (695)..(695): n is a, c, g, or t
aatgtaaccatcacttaaattttacagtcagtcatccatgttttatactcttttacaatgtaatccaaaaaatccaaaaaatccaccacgtgtcctctcaatcaacctccataacttccatggtcgctaatgcctgcctttcctctgttggggtcccactttctctccaatcccagaggagatcccttcgaatcttcttctttctccttgcttctcatatcttctttcctttcctttccccttcctacaaaaccaagaccaaacacagagagaaaataaaattcatcgtaaagggaaatgagagctttgaattcgagatttgttcttattgacatcaccaacaacgccgcttcatggcgctaccgtcagaggcattcccacttcatcacgtccgcgcgcggcggagctcatcaaagaccatatatgccgcctttgaagcaatctcaaccctctgttctccgaacccctcagatccgtaaaccctccgatcgaactacgtcctccaatggatcgtcgttggattgcccgaacccagcttctacttcccggatggagtcatgtacnncccccccctttccccnnnnccccnnnnntanntcnnncccnnncctcccnnnnnntnnntnttccccttnttnnnnnnnnnnctnccnnnnnnnccnnnnccnnntctnnnntancnnnnnccccttccncttacccccccccc

SEQ ID NO: 13786 - DNA, 726 bp, Gossypium hirsutum
  misc_feature (652)..(652): n is a, c, g, or t
  misc_feature (657)..(663): n is a, c, g, or t
cttcctttgggaaataaatattccatcaacagattacactatttctatgccaagaacataatgcagctttccaagatcagacatatcaaactcagttatcattgaccttttaaaatcttcaaacatggccctatcatttcccgtataaattaaatcatcaacatataagcatactataagcattttcccccatctgcacactttgtatatagagtatgctcatatggacatttttgaaaaccgtccccttgaaagtaaacaacaatacgactataccaagctctaggtgcttgttttagtccgtatagagcatttttcaatttataaactttgtgctcatcaccaaatttaacatagccaagaggttgttcaataaatacttgttcttgtaagtctccacaaagaaaggccgacttcacatctaattggtacatgggccataagttttgagcaaccagtgcaatcaccattttaattgtatcaagccttgcaacaggagcaaagacttctttgtaatccacaccaaattcttgtttgtaacccttcgccaccaaccgtgctttatacttgtcgatgcccccattctctttcaatttcattttatagaaccattttacagtgatctttttgtgcccttcaggaagatcaaaangttcnnnnnnnctgaaaaaatggatctaaaaaatgaaattgaaagagaatgggggcatcgacaagtataaagca

SEQ ID NO: 13787 - DNA, 627 bp, Gossypium hirsutum
gcatctttcaggtatgcctcatcctgctatccgtacatatgaattttcttgcagtttagatcagatttaccattctgatttgaaaactgaagtgtttgaaataatgttggattgcctttgtaaggaagggtatgttaggttggcatctgaatatttcactagaaagatggaatctgatctttgttggtttccatcaatcaaggtttataacatattattgaatggatggtttcattcgagaaatctcgaatatgcagagagattttggttggatatgaaaaaggctggtgtatcacctagtgttgtaacatatggtattcttgtagaaggatattgtatgatgcattgtgttgatagggcgatggaattggttgatgaaatgaaggtagtcggacttaagttgaattctcaagtatataagccaattattaatgtattgggggaagccggtaggttaaaggaggcgttagggatgatggaaagggtattgttgtgtgaatccggccctgatatttccatgtataattctttagtgaaaggttattgcaaggctggagatgtaataggtgctagtaagatacttaaaatgatgattagcagaggtttcatccaaccactacagcctaa

SEQ ID NO: 13788 - DNA, 560 bp, Gossypium hirsutum
actacattcgaatataccttaccctaagtatatctcagcggattcggccatttatttttccaaatctctaaccattttcgaaacataaaagatctatcataaacatcattcctttatagcacttaatattatagccaaaacaaactcaagccacaacccacgcataaccgaattcaatataaaagattagccattttagcatggcttagattatacaaaccaaagttctacttttcaaaacacattccagcctatacatgccataattcgagttcaattatttaattaccgaagctgtagatagtgtgatagactttgttgacgatccccgagcttgcaacttgaatccaaaatctataaaataaaaacactatactcacagaggaaactttttatagcttaataagtcacaagcaaataaacccctcagtaatatactccacccattttaagctaaaccaaataatggtatttataacaagggttttcttaaacttaaaaaaagaaaaaaaaaaaaaatttcccgggccccttttttttttttttgaccgaattcccat

SEQ ID NO: 13789 - DNA, 662 bp, Gossypium hirsutum
agtcttgaccacgtactccattcagaagggtcttgtctatctacctttgtgaagcaaactacctgtttgacaggcactcactttttgaaatgtgaatatgcccttgaaatccatttgaccccaaatgagtataacaatctcgtattacctcatgagaataatagaatggactacattgtgcacattcttcacatactctctattaacaatctctctacaacgacctaccatgtcagcactacctgacaaaggacatatactatataaccctttagcacaatgtaaaagggctcaaccctaaagcctttttcctttgaagctctcaaccttcttcctctttttacttatcttctccaactctccgccctattaggatgaaatggcgtcccttagtaccacaacatcctcccctttatatccttcttatattaaaataaaagtttattaaattgatttatttgttttaaaattacaatacgtcaaagtttacatatattacactattttactcttagatttctaatctttattaatcttgtttttatggtatagaagtaatctttattaattaagggaaaagttgtacgttaatgcaagttttgactaataaaagtattaagggagcacctatatttaggggtggatttagtcctctactgaaa

SEQ ID NO: 13790 - DNA, 676 bp, Gossypium hirsutum
ccagaaccatcattagacccatttcccccattattatcagatgacccaatattagaattagtgggccttagtacatttggacttgttctaggcctgcctccaatcagaattcttttcccaatatttttagacgtccatttcttccgcataaatgaatctttttgaccaactttcccaaccttagccaaactagatctcattaaatcacgcccttcaaactaaacaggttgatttcctccttccatggtattgatttcagaatttgattcaccatgatctgtcgttaaggatgaaaacagtgagaccctattctattcccaacgccgtcaaatttttttgttcctgtattccgaccctttcctctttgccattttccacaagcatctataggctatatggttcatcttcttcacgtcgttgatcatccatttttttcgatcaccaattctcacccgcccacaccactctcaagtgagttgttcttggtctctttacacatatcagaattgtgcccaaatatcccataattaaacaaacaatcagaagtgattcatactcgattgtctgaatatgaccactgatcttgatcttcgacactagtggtttccttaagtccacatacactgccaacctaacgaagtgtccctgccttccactgctcatatgaaattcaagc

SEQ ID NO: 13791 - DNA, 583 bp, Gossypium hirsutum
  misc_feature (67)..(67): n is a, c, g, or t
cccattattactcctatatatctatactattatttacgtcttttaagttaataaaattatgaaaagntccttctaaaattaaaataaattatatgattcgaaagtattttaatctttttacttaaaaaatttaataaaaattacacgtgaagttagattagaatttgtactatttacaaccataaaacattaactttactacaacactaaaactttattttaatataatatttacattttgcttggattatgcatactttattatcttcgtcgattgtatattaatgatgtttttaattgagtttgttttataagtcaactcgatactaactcacaattcatgacaacaccacaataaataattataatgcatttaatattcttaatttgatgtatttatgtgtttaattttcattttactcacaatttaatctaactttttttttattttaatatcgtacatatttcatgcattattataattaattaattccaaaccatgcatttctttatttattgtatgctatttttaaacacacatttgtgttctatatacctagttttcacacgcgaacgtatgtaa

SEQ ID NO: 13792 - DNA, 680 bp, Gossypium hirsutum
  misc_feature (637)..(637): n is a, c, g, or t
agttagatgtgatggatatccgtgtaaaattattagatttatttgaaacgagaaaaaggtgggaggctagagacgacgttgccgtctgtgttctatctttaaccacaaaatggaaattatgtttggttgctaatttgataaatgaattccttttcctttcccctaccaaaattgaatactctttggttggttttaattccattataattatatttttttataactatataaattaatgaaataatttttaagaatatataaaagatcacttcttaaaatttttgaaatttgatgaattactgtggaaattttgttcaatccagtttgattagtgttggtatttggtttgattttttaaaaattcataataataatattgtaggcgctgaacaatattattattatgaatttttaaaaaatcaaaccaaataccaacactaatcaaactggattgaacaaaatttccacagtaattcatcaaatttcaaaaattttaagaagtgatcttttatatattcttaaaaattatttcattaatttatatagttataaaaaaatataattataatggaattaaaaccaaccaaagagtattcaattttggtaggggaaaggaaaaggaattcatttatcaaantagcaaccaaacataatttccattttgtggttaaagatagaac

SEQ ID NO: 13793 - DNA, 620 bp, Gossypium hirsutum
  misc_feature (615)..(617): n is a, c, g, or t
tttgaggacgtacaacttatctttcttctagatttcattgtcaagaaaacaagtaaatttgttcaaagcttggactatctgatcgactcaattagacacgactcagttatgatttttacattttggaatcaccttgaacttacgtaaccgaaattgaaatttcagtttgaacccaattcaacatgacccttataatttagatacttgaagaactaagcctaaaagaaaagaaatttgggattggtgtgttctatcttttcaagttaaatttatgacccaatgcatattgttttaagtagtttttaatcatagtctatctatttggctttcagttcccttctattaccagctcaagattcgcaagcaagtaatctattgtcaattatgcctaatttaccaaatcaagaacatcataattctgagctgtctaggtgaattttgattcccttttcttggtatcaatcacccttttatattttttattgagaactaactttatcattaacacattgaatacgcttaaattctactcttgttatttgatttagattttaaacttcgtttacaggcctgaagctgtgcaacaacgagggtttctgaatcgaactacaaggnnngtt

SEQ ID NO: 13794 - DNA, 596 bp, Gossypium hirsutum
  misc_feature (546)..(550): n is a, c, g, or t
agtgtgccaatgaagcagccgcatgaactggtcgttccctaggtggcgcggtggaaggctcctcatgctgtgggggaacatcatcagggatgtcctcaagatcctcctcgtcaatggcatgcgagagacggtactgaggaggatcggtcccacgtcggcgctcgatcatcctcatgtgtaacatagtcgtgatgccctgtggggacatctgacctatcagggtaagcgctgatgactgggccacggtgttgaggaggccgaagtgtctggcaaggcgcgtcacgtaggggccgatggagatcactcccttcctatgccgctcggtctgatggcgaatggcgaaagcaatgaagtatgccaagtcagtcacgtgtgcattcgccatgcaccataaatagtaggcgtcgtgggtgttgacgacgccggtgctctctctccttccggtcaaggtgtgtgccaatatggcatggagatatcgtagggaaggggggagagctgaggccttcgagcggctggggtcgtaggtggaagagagtggtgccaaannnnnccagcacaaggagggggagatgtggatattgcgtggtagtgcatca

SEQ ID NO: 13795 - DNA, 560 bp, Gossypium hirsutum
cagactgtgatttagctacctgtttgttctcaatcttctttgtgattttctctcggtctactttctcagtaactgatttattagtctttagggacattattagcatctgcaacttcatgagcagtcttaattttgatctgtgtagtcaatttccggtcttaaataggctcgagttcgatctattctgctgttaacttacataccatttcattttgcggttgtactgcatagtatctttctgtgcttgctatttatatgtgattctgtgtgttactgcacaaatatatgttattctgagaagtgatggtgcattttgccccatcaatttgttcgagcttagaactgaatgaaaattttgtttgtagattgtaaataccaaatttatcataagttgaattatcttctgttgagagtacatagaatctgaagtttggagaactgaatccccataaattaagattatccatatcctcatagaagcattcatattacgtcaatgattattggtcttactgtaattgtcattttaacttttggcttctagagagtaggtgtttgca

SEQ ID NO: 13796 - DNA, 687 bp, Gossypium hirsutum
acagtgaagaatgcacactgatggcagtgatggatgctctgaaaatgcaattgtgtgtaacttgacttaaaatttgcaattacagatctttcaaggcctttgcggcctctagaactaaataaatcatttatgtactataggaaacaaattatatataagatttagaattcatttagtttatcattgtcggttgaattgaaagaaagagtagaaaactagaacaatggtaacagaaaggagcactgaggcagcagcagaaagctaatgtgaaagggaagtgtatagaatagaatgttgtaagagaggggaacacagaatgtcaggtttgaggggaagtattgactacagacaaaatttaaccctacaaagaaacgggtatgtatttcccacagactactatcctgcctgctcatcacataaacttattgagatgtgccgacaatctcaatctaaaagtgcacatatttattaaactataatttttgttcctaaaagcttatctttcttgtatcactcaaaagcataatagaaaattagaattctactggtttatctctgcagccacaagtgatggaagctaagatgtctcgatatcattaattttgtgactacaggtataatatacaaatttaattttagcaaaatgagaaaaaaaatatttacatgcaagacaaccatcatttcaca

SEQ ID NO: 13797 - DNA, 646 bp, Gossypium hirsutum
tcttttctctcaaaactgattgaagtatctttgttctaagtaatcgaatcaaaatcctaaagcttcattctttttttctcattgatttcaactatttttgttgttttaatttggggttaaaatatgccataggtacttgtatttttcagatttcaaaatttatgtttaactcttaacattgttaagattattttattaaatttaggttattacgaagttattgttttagttacattttgtcaattgagtattttttttattttgaaatgtcatactaacaaatttaattaaaaaaatttaacaaatttaactgagttggacctagattttgaaatagaaagtagaggggcaaaattcttgaaaataaaagtataaggactaaatatcaaatttgagaagagtacagagacttatagcatattttaaccttaatttagcattattatagacttatgttatttagcatttggttcttagtaaagaaggtatatgaatgatgaatatatgttacgactgtccttgattttgtcggttttactgttttagcatagtgctcggttcgatcaatgcttaaccagttctaaaacctgttctgcttagcagattctgattacgtgctcttgtgttgtcagtatggttcacattc

SEQ ID NO: 13798 - DNA, 654 bp, Gossypium hirsutum
ataggagtttgttgggtgctgttttctgtttcttagacatgtgggattctgcttttctcgagcttctacaacttttcccttgtttttcatgccatagttcccttttctggtaatatttaggtgcttcttcctgaaactatatatatattttccgtggccttgtttatatgaagaaactggtttttgaaaaccttcctgatttccccgagccttttattaactactttatactgagtttataccaagcaaattttcaacgctctattaatggtttgcagggcatctaactatggattttataggaagcaaccttataacagtatgagcaggtactaacaatgcgctaaacagcaaattaatggaacctctaaatggagctgcttcatttggattaacttccatagcgaatcatcaatgaaattgaatctgttaccatatagaaaatcaaaagtaaaaccaatgagcatcccttcttggactgagagactcataagacggtctttgcaaactgaaaatcaaccagcatatcctatatcacgattgaatgtactcaagaagagctgctagcatctctttcgcccgccttcttcttgaggaaggcatcagtgagcacagtcttcgactgcaaagatgcctttagtaacttcacaccct

SEQ ID NO: 13799 - DNA, 696 bp, Gossypium hirsutum
  misc_feature (682)..(683): n is a, c, g, or t
  misc_feature (686)..(688): n is a, c, g, or t
cttcagggacaggtctttaagaagaagaagaaaagggatgattagcaatatcaaatatgcttgaacaagattgaaaaatttatgggtgtattcactattcagtactctcccctgaaaaagatgaacaattttacttacaaatttcaaatggaaaggcagccttaaaatgaaatgctcaatcgttactgcctttagcaagtatcctcccacaactattgtagcctgaggcagccataaacatacacaaatttcagtcaaatggtccaaaagtttatgtcaacaacaattcaagcacagcgaccactgtccgatacagtgaggggtattgtttcaacaggcgctaacagttaattatcagctacaataatttcagaaatttgtgataagcatgaataaaatgacaccaataatagcatccttggaaaatctttaaatagaaacaataacaagaaagatgatgaatcaaaccttttgcattagtgccaccactgtttcaggagactcaggagtcccgtgctccaaaatcgcctaacagattgattgcataaatgttatgctctagcttttggaatatattaaaaaaatcaaatgtattaacatcaagatatacaatcttacattcatcatacaggaattataagtgtttatccagaatgcaagtttctgctgatggctaagaccnnccnnncctccccc

SEQ ID NO: 13800 - DNA, 651 bp, Gossypium hirsutum
agaaagcaaaggtaaaaaatttgacagtggatggatctgacaacatattcccaaaattagccctcagtgtcgatgctatcacgtagatggaaagaaagaaggcattgataaagcattcgaacttgtctatcaatgccgaccctagcggtggaccgtcagggacagctaggccgaagagaaaagcaccgattaaaggagatcgatcggtccaatgtgtaaatacagcacacccgaatgcaaccatcatggtggctgtgatgtacacgtccgcgaccggtcccccatcgggtgttcttttaattacccaatgcatcaatggacgaaacacgaagataatgagtgttatgaaacaaaacatgatcactactcgttctataaccaacaatggtgatgcggtaaaatttcgtgacaacgacattacgtggactaaaaacatggtgctcaagtcgcctacggcagcggatgttagggcaagtcgtccgagttcggtatttaagatcttgagctcggctagtaggcaagcgatgaccgaaaacgatgttaacgcttcgatcactgttccgattagacgttcggtttttacttgttcggtttcattaggttgtttgaaggtttcattaatagctgcaccgaccaagatggaaagataaa

SEQ ID NO: 13801 - DNA, 690 bp, Gossypium hirsutum
gatgtggaggatggtgaaatgatggaccctggtagcaggtaatctgcagaattcatcatgtaaattgtttctttttcttttttttctaaattaatccttttgcatcattgtggtttattccactgcatacaattaatttactatttctacttataactacctgatgttatttttatcctgatttcttgaggattttacatcttagtaattattgttaacatgaattgagactgtggcatcaattttctgtatcattggtttgggacttgatttggttgttttaaccggccttggggtaatttttctaagttgctgtttcctactgctcaaaatggtatcaacttaccaaaagccatcatttgtatgctaagagtagtaaatctcccttttgtgtgtgtgaacgagttttgatctctgaagatgtaaagttagcatcacaattgatgaaccttctaggaaactgcataatcgttcttcagcaaagagatttggcattataaatttcaatattgtgttgataggaacccaagtattggagtatctggtttaggaattgtgatatattatctatggagagttaccaactaactttgctttctagttttgagaaagacaacctggcttgcaatataaatttctatatctagtccaagtagtagttctagaggattatctgtttgaggaattggg

SEQ ID NO: 13802 - DNA, 430 bp, Gossypium hirsutum
gatgatctctcaaccaccaatccagcaacaagaaattcctccctccacaaatttcatcaaataaaattggggtcaaaataaatcgaccattttttgtttcttggaaagttttcagtttcccaccctctgtatccctacaatgaccaccttaccttcacaaaacctgcaatcggtgcgacctctatatttttcttcaattaattctcttaaatttggatctcaaattccttcattaaaattccccatttcttctcctataaaactaaaaccagccaagcttttcacatgcaataatggcaccaacaactctggggtcgtgggaaaagcctctacctctgaattcagtgcagatataggtgacgtccttggggatgttaccattttcactgctgctgatcagcctgtctttctcaaagaccttagggaccaa

SEQ ID NO: 13803 - DNA, 460 bp, Gossypium hirsutum
aaaagatgtattagatttatacttgctttcccaattcccaacttcttgaaaatagacagacgtattagatttatacttgcgcctagattacataattatttttctacataatgatttccaattgaatatgggatagtgaaactactttgtttctttaactttggtggtagcttattcatcaacatcattttgaaccctttagtgagagcagcagtctcaaattctcccaatctgcacttcttcgataatatatctttcatgaacttcacataattaggcatttgctctaaagcttcaactagttgtatgttaatatgaagttgcatcaaaaccttcaaaaatcttttaaattaaacatcttatttggaattatggaatcattgtggaaaaggtagaggcggacgtccttttagttgttgatattgttttgttgtggcatttttgttggcaacctgatttg

SEQ ID NO: 13804 - DNA, 627 bp, Gossypium hirsutum
  misc_feature (34)..(35): n is a, c, g, or t
  misc_feature (622)..(622): n is a, c, g, or t
tctacatgaaagtcctatcttgcatagccactgnnggttaacacttcaccagcagcatttttgatcaaacagttcttgccttcaaaaatcagagaatagcctttctccaatagctggccaacacttagcaagttttggtcaatatcaggtacatagagaacctctgaaatggttttaatacctgacttggtgcttatcaaagccttgcctttcccttttgcctccagtagctcaccattgccaattctgactttggacttgaaggtagtgtcaagctccttgaatatactcttctcagaagccatatggtgggtgcatccactgtcaatcagccaaattttgttaaccttgctcgagcttgcaaagcatgatgctgaaaaaacatgctcttctggtgtttcaacctcttctgcagcttgagcttggttttgaaattgtggttgtgcttttgatttgcttttacagaccttttcaatgtggccaaattgcttgcaggctctgcattgaatgtctggtctgtaccagcagtatttctcaagatgagtagtcttcttgcaatggacacaaggtgggaacttccttttgacaggttctttcttcttcttctcagtccaaggatttnaaaaa

SEQ ID NO: 13805 - DNA, 552 bp, Gossypium hirsutum
tttgatcacgaatctaaacccaacaggatgaaaaacgatttcaaaaggtttaatttctatatgcatgaactcaggttgagtaaaacacgtaataaacctttgccacacctacaacatgtgattcattttcaatgttttgtccacgaggcatgggacaagaagtcaaacccccttttttttcatatttctaattaatataatctattttaaataaatattttattgcagttaaaagtcttcaatgtagttccttatgtcataagaataattacttttttgaaatgtatattttgacgagttccacggttgaatacttgaattttctcctgtaccttccatttttcacacatatatatatacacgcacaagtcatactttttcttggttaaacataataaaacaaaaccataaaaatgaacggagatcaaactttcaatcacattgttaagaaacaaagtaaactacaattagttttaaattgactttaacataagaaaactgatcgactggcttatgttgagaaaatcgactaaactgaataaattttgattc

SEQ ID NO: 13806 - DNA, 664 bp, Gossypium hirsutum
gttcgaaccaatgattctcattccaacttatctatctagtccaattccaataacagtagttgtgaataatgtggtccaagcttaatacttatgtggttgatattttcaatataatctttgggtattggcttgatttgtaggtttggtaagagttgtactctaaaagtctacaaaataaatttccatatggtcctaaatcattataaatggaattaaattacacatttataagttaactgaaaagtactttcataataaattttcaattttttcattttccagattattattacagttttaattttcaactaataagttcatgcatttaaaactgaaagacactttggaaacaataaaatatttccagcattgttcaaggaaaaatttatttaaagtcttcaaacttttttccttgttagtattggtgacaaaccatcagaagaattattgaaaaaaagttgatgggatagcatgtggggttatcaggtcactgaaaaccagggaacaagcccttccattctgtaaaaggtttgcccttttgtttaacagatttcgcagagtttttcacatgtaaaagctcatgcttttggtattccctgatcattttataaaaaggataaattgcgactttggatttttttctttggctagcccttacatgatt

SEQ ID NO: 13807 - DNA, 677 bp, Gossypium hirsutum
tcatgaccaacacaagatcacctactgccttgttgagcaactagttttccaccatttcgaggtctaaaattcaaaccccctcccccgaccatcttgatctttgtccaaatgtagcatgagcaaccggatcctatagcacatttcagtactcagcttcgtgacctaaccgcacactaagaatgactagatgaaaggttgtatgtcgaaaagaaggtgataaaagcataccggggttccacaagtagtcgaattcctaattgttggggataagatcaggctgttattctctttattgttctgtttccagtaaatctggttggttttcgttttgtttgtcttaggccgtactagaatcaaggaattctgattctcgaaagctcacaataacttacctgagttgcatgaggcaagatgctattttctaaatcctcctcattgacagatacgggcaatggcaacatccgactcattaaacctggcatatctgccatgctgcaaaaagccaaaatgcttgtaaagagaattgatcaccaatcgataattataaagaaaatccacattggcacatactcttttaggacagcggtaatgttgttccttgcatgacaaaagagatcaatgttatcctgtaactgtacataaaagctttgcttaataggccagccagataagactgt

SEQ ID NO: 13808 - DNA, 599 bp, Gossypium hirsutum
gcaaccttagtttgcttccccaagctagccgtcgcaagcttccatgcgtggcccccctcgtctgccacgctcctcatccgccaccatgtcggccaccatgcccctcagccttggccaccacgccccacgcgtctgacattcctccacgcctctgacacctgcaaaacgaagccacacgcaacagtacaaggatccaaagcataaaacgacaaaaatagaagtttaggggtggtaaaagtttgctatataggctgaacaaaagcattgtaatgggggctctggggcaatttaacaaactttagaaataaaaagaaaactaagttttttcttctctagacctgttattttattttgttttactctattttatatatacatattttttaacgaaaacaaagtagagaaaaagggcttaccggagatacctcacaactgcgccgtcggtgtgtggttctccatcgctggcccggatctgaaaggggggagctacgagcctcagtctcggcgctcgtgggtgttcaaagacccggcttttcaaatcgcccgaaggctaggctctaaaagcccctttgtcgcttcgttggccgccggtatagtgg

SEQ ID NO: 13809 - DNA, 657 bp, Gossypium hirsutum
gtggctttggtaatttctgtatggatatctggctcttaaactttttgagaatatggttacaggtagtggtttgaagtaattccttttcccatgtcagtaaaaagggaaactttagaaaccattggaggaattcctttcatgatggaaattcaagtgacttgtaggctttatgagaagatggttaccagtagtagtatgaagtaattcctttatccataacattaaaatgagaaactttagaaaccaatggagaaattattatcataatgaatttcggatgactttttgattgaatggctcttgcctttcgtgagaatatacaaagactttgtaggttaagtctttttcttcgagtatctagttctctataaaatatctttacccattgaatctgtcatctctttgttaagataaatgactaatgatgactctggatcatgttacctcattctaggaagctactcgcatgtgaatggagttacttgacctgggtctgcatgtattatgcattccagttatcattgatcgtagaaagttagcttttcttatctttggcctaaaatatgcttgggatctacttgttatctaccctctttgtaaaattttccatggatgtacaaaactttaaaaaatgtaacttcacttcctctgaaagga

SEQ ID NO: 13810 - DNA, 617 bp, Gossypium hirsutum
gaattctcagttatggccatatgcaaagcagttcttccatccaagtttctcacattgatcatatctcgaatgtcgacaacctcaccgcatactaattgcttcatcagctcgatctgccgatctattcttcggaaccccggggttctaaaaccagccacagccacatgaagaaaagtatttccgtaatcattcttcacagaggccaaactcggagacacttgaataaggaacacaacaacctttaaataaccgcgataagctgccacatgaagtgccgtgtttccttgattgtctgtagaggttatgatctcaaacgatgacacgagatccttcactacctgcatttgagaggcaagaaaaaaggacatcggtaaatgtgattgccaacaacggactgtattaaacgctaatcactgtaatatgatgataatcggaagtataactggagctcaacaccattaatacagacaaccgataacttgggattaacacactaagttacctaagtagatactgatgcttatgtggtttaatcatcaaagatgaaggattcgagagaaattagtgccatactaaccactacttggacattagtgccttactaacctctacttggc

SEQ ID NO: 13811 - DNA, 672 bp, Gossypium hirsutum
atgtgtgagggaggattaccagaatggttggacggtccataataatttatttcatgtgaatcttgtgaactctcaaacttcttggatcattgtcttgaacctcatattttcaatgtaaaaataaaaccaagttacattgtagtttgtagaatttttatttatttatttcaagaataaactccaaatcactgaagaaaataatactcaaaattcagtagcaaggaaatgtcttgaaattttaaatatattttttttatgatatttttaatttcgaatcattttaatcctaaaaattaggaaaagaacaattaattaattgcgatattgtagtaatttaagtttatttatttttaattaattaatagttagacatttatatattgtaattatttaactttatttttatcaaattaaaattcagatactacttttagctaaatttctaataaaaattataaattctataaaagaaactttggaagacttagggacaaacacaaatttatcctcactaattataagatgaaaataaaataaaaaatttaaaaactcataaattgattcacttatttaaagaaaatagcatttatatattatgattaccttagatagaaagaaaaagggaaatgaatgataaaagggggcgggtggcttggcttgtaaataggtatg

SEQ ID NO: 13812 - DNA, 641 bp, Gossypium hirsutum
agattagctcgaatcaggttgtgagggttgcttggcttgcttttccatgaactattgataaaccccaatggcatttcccaaggttccacaccaactctaggagggtctcaggtcgtggccgtattatgtcaatccctggcaacaacgctaaaaccttgtcacttgtgaatatgatgtgtgaattgtgcaagtatacacgttgaacaagtaataaagtaatgagtgagattgtctccatagggataaaatgatataattttgtcgagctattagagttaggctggattaatgttgaagcaaaataatagtgagaatgtagtggtaaaatgagagaatggtgatgtataaaattggcaacacaaaacaggtaaacggaacaagaatgtcaggaccaagtaactatagaaaaaaagattaagtaatcacaatgttgattaggacggctgggattactagtgcatctaccttctctagctattaatgccatagcaatgtcttatattgtttgataggtttctacagtagtctacttctctcgagagaaaaccttggttaccttccctaaggtactatctgtctatgaacttaagttaggctaccactaatattttttatcctcttccgatgagacaggctctatc

SEQ ID NO: 13813 - DNA, 637 bp, Gossypium hirsutum
caaccagttcaaacagacttgttatctcattgggaatctctccagttaatttgttgcttgaaagatcaatgactctgaacggtccaagatatctttcatattcatactcgtttcctttctatctatgatctaacccttgccttttcaacatagctgtagcctgtacgcctaaacaagaaaccgaaaacatactcgaaaatccgaccaccaccataggtataaactcgtttttgagccatggcggtaagattgtttaggcatgatggtattgttccagagatactgttttgagattggtccaagatctgcatgtgtgccagccggcaaaagttggcaggtatccttccattgaagtcgttagcttgtaggctaaggaataccaaagatggaaggttttaacatatccaggctggtatatttccagacaatctattactgcttaggtccaaaaagatttaagttactgcaatccttcaaagatagaggtatctctccagagaaactgttattgtgtaaattaagagctttaagtgaaaacagtgatcccaaagatgtcggaatttcccctgagaagttgttattatctaaattcagaactagaagttgaaacaagcactcagaaagctctccagacaaa

SEQ ID NO: 13814 - DNA, 676 bp, Gossypium hirsutum
gagacttcatgattagaaaaagaaagaatttttagagctcaaacaggggaatatgactgtatctgaatacaagtgggaatttgttcggttaagcaaatatgccagagaatgtatctcgaccgaagttgctatgtgtaaacgatttgaaaagggattaaatgaagacatcaagttgttagttgggattctggaattaaaagaatttgttgtactagccagccgagcacataaagctgaagaactaaataaagaaaaagacaggtagagatgaaagtccaaactttgagaaaaagatttatggggaaatcacaatcgtcagattcaaagaaatcaaagaaatatcatgatcattctgtctcatctgttgggtattttggaaaagacaaaggctctcaacattctaatatgagatctccatctccatcagtagcaagtgttggaagtgttggtagtttcaaacctagatgtaaacattgtagtaaattccattttggagagtgccgtatgagaagtggagcctgttttagatgtggttctttcaaccaatatcttaaagattgtccaaaaaaggcttgaaaaaaatactgttcagacttcgaagctaaatagccctagctcgagaagtagaccaacccgtcaccctggcaatatcagtagtagccgaggtggctacaaa

SEQ ID NO: 13815 - DNA, 667 bp, Gossypium hirsutum
gtgaccaagtcagtatgtatgccctattttggcacggcctagacacaccagcgtgtctaatgccatgtgaggtgcacggcctattcacacgggcgtatgacctgtacttgttagaaagatatttatgttttggaaaatttttgtatgtgttcggtttagtcccgacccttttctaatgcatgcttatgatcttgatgacctatataagggactctgtggtgatgtcaatcactgatgctttgatgtttatgaaatgaaagttaaatatttcgatttgtctggtaatgcctttcaccctagtccggcgatggatataggttaggagtgttacatggcataagtcagtataccctacaggtttggcacggcctatgtaacaccccgaacccgaaaccgacaccggagtcaaacacgaggtgttaactgactttaaccccttataaaatttattttccagacactgcccaatctgtgtactagtcgttttaaaaatcatatcttgagtttcgtaactcgaaaatcagtttcgtaatttttcccagaaactagactcatgtgcccatctatttatttttttctagaatttttggtcgggccaattagtacagtttattagtcaaagtctcccatgttgcaggggtcgactacactgacctttgccctttag

SEQ ID NO: 13816 - DNA, 551 bp, Gossypium hirsutum
tgtcttggatagcatgcaagtttactgctaataagaaacttaattgtggattaatggtgtgataaaaaaattaaatattaaactcgttactaacatgtgtgctccaaaggaaatgcttgattttatataaaagcatcccttaaagtgcaaagtatgttactatctttgtcatagaaatacttgtaatctggacaagtagaaaggccatttatcttttataaatatattagagaaacccattttatgtcacttgcaaagagccgagctatggaattacactaatcagatttgcctctaccttggctttcttcaaaactgaccttaccccttttaattgaaactaattgggtatttctcctgtttgcttgggaaaaacagcccccaatgtttctcatatgccggttctttattcttctcatcaaacatcgcaaacaagtaaacttctattgcttttccaggcttcctcggagtccccttgcgctgattcacatgtcgaaccaaattcgttttataagtcttcgcattattaacacttgtaatccgttccaccg

SEQ ID NO: 13817 - DNA, 569 bp, Gossypium hirsutum
  misc_feature (510)..(511): n is a, c, g, or t
  misc_feature (516)..(516): n is a, c, g, or t
  misc_feature (519)..(520): n is a, c, g, or t
ggccttgtagttgctttactttctatattttcagagtaagaatcatgactcgaattgacactcagtaaattgcttgcttcactgtgggtattctgtaagctgtcatttgttttatcctcattgatagaatattgagttgccacagcaacactatcagtttcatcagaaaactcattcttcttcgatcccatttgagatatactaagatgcatacacgatgaacaaggagcagagaacacgttgcaggttccagattctgcttttgtatgaaccttttgactcagggaacgcctaactaatcttttcacagtttttggtggtacctatgaaaaaaaggcagaattaagtaaaaaaaaatagaaataagcagaaagctagatatctatgcctttaaacagacatgtacttttcatccaaataaaaaataattaatcttatccaacaaatctaatagcaaaagttctaatttggcaaaagaaagaggtgtattagcaagaaaatgagctcganngctanagnntgtctagaaaggtaaaacaaggaataaaataaagcaccaatccaatccc

SEQ ID NO: 13818 - DNA, 645 bp, Gossypium hirsutum
aaattccaggaagattcatagggacttaataaaaattttaaaacgagtcataagtaaacgagttttagcctctacctgtctgcaaattcctgatgtgtcattcgagtaggatatccagatctagacattctaacagcctccaaaactccactacatctaagctgctgtgagacaagatcctcttcatacatgccagggagctgcttgcgatttggttttatgcagcaaataaagtgaggttttgtcttctccaaccgctgcattagtttgaagagtttaccctgcaagtatagaacaaaaacatcaacatttacaatgcatgtttttatgttttatactgaagactaaaatgagagagcttctgcaataaagaatggatcacaactattgagtaaattttaccttaaactttgcactgacactttggtttggagaatccaatgaagttgctggttccaaagtttgattaagcattttaatggcaaataattgtggcaattggccgttacaggatgaaagaagttcgattaactcagggttgagtgaatcttggttcttcttcaaaaagtcatttgtatcatagagtacctgacagaactctgaaaatcaataatttcattgtatgcctcgcacattaccatatca

SEQ ID NO: 13819 - DNA, 548 bp, Gossypium hirsutum
tcattatggattctcattgcccaccccttcttcctttcttctctcacatcttacgacgaaacaggaaacgagaatataccatataccgcattgcaaaaacaaaacaaactctttaacaacttccattttgtttgatcaagacctttttgtgttttgtgctctcatgattctttctttgatggggttatgttattcagactcacgtgaaaatgttggatacggatatgtacgctacatgaatatgttcttccttgtatttggaaggtgttattcctttaaccaagtatcaatatgtgtcagatttggatagagtaaataacatgggagggatatacccccctctttctgcaaccagttttcattgttcaatgtttcaattcttctaatgccacatttattatgttttctggcattctgcttgtggtgtcaatgacaaacctagagaaagtgtttattgttgttatttcttattatgaaaaaagtcgtagtaatttacaatcttaaaaagtgctagcaattattacatcatacttactgtgttctcttcc

SEQ ID NO: 13820 - DNA, 622 bp, Gossypium hirsutum
  misc_feature (157)..(157): n is a, c, g, or t
  misc_feature (160)..(160): n is a, c, g, or t
  misc_feature (173)..(173): n is a, c, g, or t
  misc_feature (177)..(177): n is a, c, g, or t
  misc_feature (181)..(181): n is a, c, g, or t
  misc_feature (188)..(188): n is a, c, g, or t
  misc_feature (193)..(194): n is a, c, g, or t
  misc_feature (207)..(207): n is a, c, g, or t
  misc_feature (217)..(217): n is a, c, g, or t
  misc_feature (229)..(229): n is a, c, g, or t
  misc_feature (241)..(241): n is a, c, g, or t
  misc_feature (246)..(247): n is a, c, g, or t
  misc_feature (252)..(252): n is a, c, g, or t
  misc_feature (255)..(255): n is a, c, g, or t
  misc_feature (569)..(569): n is a, c, g, or t
  misc_feature (571)..(571): n is a, c, g, or t
  misc_feature (608)..(608): n is a, c, g, or t
  misc_feature (610)..(610): n is a, c, g, or t
  misc_feature (617)..(617): n is a, c, g, or t
tcaggatggacgtattgactatagtgagtttgtagctatgatgcaagacacaggtttaaccggaaagcacaaaacatttaagcattgatacatcatcttgctacagtaagactgcttattccatggttgtttagactacaattttgatttgaacctnagnccttttggtaatncctnctgnaactatnataanntgggtagtaattnccttatttgnattttgttagcncttttcagttcnctatnntgagntangttctcttgactttttctttttcttgaagtacccgtcttagacacctatgtctgatgcatatctggaaatgggtgtagagacatgaccctaaaaaagccctccaaatacatgcaaaaactttgaaaaatttaaacatactcataccagatatatactcttatccaacatttacacccaagctgagatctctttactcattttgaccctcaatttcttccaggttaagtcattcattcatcagtccattcatttgccctcgtctgaaaaagaaaaagataaaaaaaaagaaggaatacacggtataaccttaaantntgctgctagcatctaatgtcatcaaatccatgtttancncatttangtcaa

SEQ ID NO: 13821 - DNA, 600 bp, Gossypium hirsutum
ctatatgctcgaggctctaagtcgtggatgaaagaagcattgcaatggcggtcgaggttttgttcaaacaatgttcaaacgttgaagtatatagtggtggacaggaagttaattgaaaacaatatggtgcttaggttgactaatattcaacgtttaggattagtatttaatagacggaaagatgtgaagcctatcttaatgttgctgattaaattgcatcgtcttaggtcattgtacatggagttttatttgggtccaatctcaatatcttcttcagatttggaactcctttctcaatgtcatcacctttctaaactagaattaagaggagagataaaagaagatctatgtccgagccatcatgtttcgaaatttcttccgccaaccattgtcaagttaacattgtgttcctctaagatgattcatgatccaatgggagtattgaaaaagctgccttgtttgaggattcttagattaagggataatgcttatgtgggggctaaaatggtttgctctatccatgggtttcctcaacttgattctcttgaaatgatttctctacgagagttgaaggagtgggagatagaagaaggcgcaatg

SEQ ID NO: 13822 - DNA, 554 bp, Gossypium hirsutum
tctccagtcttgatggtgaatctggcttctgagatggatcaatcggcttcccttgagcagttccctgcctccttctctttgtgtgtctttcttcctcctttcgaattggactcaacttgggctcggcaaggtcacgcccgtgtgacacgatcgtgtttgattacttcaggctgtgctcgaacctgttagaatggcacgggcgtgtgttctactcgtgtgagtcgtgcttcgattctgccaaattgacacggccgtgtggtctgcccgagtgaggaagtccaggccgtgttgatttcgtactttggcccattttctctattttttgcctgtttctcattccttttgctctcctatgctctcttaagtataaaacatgaaattaaggcattaggagcatccaattcaccaattctaaggaaaaatcatccataaaatgtgttaagcatggggtagaaatatgtataaattacggtttatcaatctgcgaccacgttcgcctttctctagtgatagtcaattactaactcgtaatctttaatcaactccagccacct

SEQ ID NO: 13823 - DNA, 280 bp, Gossypium hirsutum
ggattaagagatagatcttattgcctattgatttcgatgttgtattatttgctccttgaaattttgatgtcattagatttagttttaactgtttatttctttttctgtttatgatggaatttttatgctattggttttcaagttagtgattagaatttaggaggttttagagggaattatcagtcccataatttatgaagatttaaagaatatttaaaggtttagggaaaggtttatgcttgctaactgttgtaattggaatggagaatgatatgaaggt

SEQ ID NO: 13824 - DNA, 658 bp, Gossypium hirsutum
tatatcccgaatcagattggtcctattttttttattaaaagtaatatctaaataattaattttgtcttaatttaaaaaaaaactaatatcacctaataaaaacatgacacatgatatgttcttatatacttttttgagaaaatgaaacatgtaaaaatttagttactacttctgataaaaaaaaattaaatataagattttcagaattagatcaatgatcaaattaaatatctaatcaatttcttgggacaataagatcgtataacttgaataaaaaaatcattaaaaatttcataaaattaaaaaattattaaaaataaaaatcgttttaaactatttaactatagtttaaattaatttgtatctatttacaaatctattaatccattgcctttttcgacggattccagtccaaccatccagtagagttaaaacaagcatgaacgagtgctggtaggaacttaagccgcaagggccgaagggggacaaagaaatactgaaagcaaaaagggggaaaaaaataaaaaaggatcggacagcgtgaccttgacttccgtctatgatgttaaaatatcatcactcttgaagaagctacgaagaagctacccacaaacaccatcaggctcattctttgtctctctctgtctctctcagctcg

SEQ ID NO: 13825 - DNA, 679 bp, Gossypium hirsutum
aatcactttgttaagaaaggccagacggcctgaataaagaacaggtcttagtttacaagattaaacatatcccgggtgtttctaacaaaggagtcaaactaaataagcaaatggttaaaaatcttctcaagcaattagcattcacataggaaagatactgttgatagatagggccaacatattgttcaatgatctaaataacccaagtaaatatagacagattatataaacttgataaatgtaaggaggacagcacataaaaggatatttccgagttcgctaagtcacgaaccaggccagtgccatattacagccacatcatccttacatgaccaaactagggtaaagttcattttaacaagcacaggtaaagaagaaaaatccattacattcttcaaaaatacagagaagaaaacaagagcacatatgcaaatgtttcatgagaaaatattttgacaacttgagttatatgttatggaaaaagaaacacaatatttgttttcatcaatgtgtaataatactgcatcagcctttacttaattcctttcgcaatagaaacaccataatcagaactaaaaaacagaatcagagttgatcacgatatgtttcatttcagtcactttttaaacaactaacaaactcattattcaataattattgtaactttctgcacggcttt

SEQ ID NO: 13826 - DNA, 588 bp, Gossypium hirsutum
ttcttcataaagtttgtgttttatgttcgtaaatatccataaaatgctatcgcaattgtcatcgtttgtttatttatttgtgttagtacagtagatgaatggcttatactttatatatttcggggtttgcagttttcaatagccgctttaaattccgctagtaacaatgaagtgtgtattttatatctgtaaaatgctacccccaatgttatttatgcttataatgcttctacacccacaaatatttgtgtttgtttgatgacgcggctatcatcatttgtttatttgtttgtgttcgtagaatagatgaatggattttcatcttttgggttatttatactttatatatttcgggtttgcagtcgttgtagcggctttgatttccactggtaacaatgaaatttgtgttgtatgtttgtaagtatccataaacactactatcgatgtcatttatgcataatatgtgactatattgacaaatatttgtgttaactatacggctatcatcatttggttatttgtttattcatttgtgttatgagaatagatgaatgggtttttggcattggggttgtttatactttatac

SEQ ID NO: 13827 - DNA, 631 bp, Gossypium hirsutum
tcttttaacacatacagctaacttctatttatgtcttcttataaggatatccgggctctcattaacaaaataaataagtctatggtggctcctttaccaaccatgtactctagtgcattgtgagtctcctatcctctttcttatgcgatattaatgttgcattctaaatacaatgtcactttttttaaatattttctgctctctgtttttctctttttccttttatcaaggggttgtcaatggtttgaacatgggactaggggttaactaaagatttaaatcaaagcaagtcttttgtcactgcatgaatgacattctgcctttattgttatcattgttttcttgtctaactattttcctgtccttcagtcgcggactcataaaaagcatgctacggaagaatccagaacttaggccaagtgtatgtttcttttcccttctcgtttatcctacactgcctttacagacgcaaacacaggagatatctacaagagaaataacatgtatcagaaaaaggagataaaaagcagtacttggacttattactagtattttacttttggtagtgggtcaagttatcaataattagatcaggctgacagatattagctttcaagaagttggcgattta

SEQ ID NO: 13828 - DNA, 407 bp, Gossypium hirsutum
tgaaactagtaactccgaaatgatttctactattctcaaatttgagatttattcttatttgtatgtaatttttatcttcaaatttaagatttaatctttctattttatttttagagtaaactattaaaatagtcacttttgtttatttcgggttatattttagtcacttatgtttgaaatgttatgttttagtcatttacattaatgtgttgtaacatttttagctactgaatagtgtaacggtaagctgacatggcacgttaaatcatcatttcaaacaaaaaatattaggttaaattatacaattggttcccatatttttttattgagcaatttaattttttttaaataacaatattaaaagggaagaaaatagaaagagaaatagaatagaatgaaaaaaaaaa

SEQ ID NO: 13829 - DNA, 672 bp, Gossypium hirsutum
caaattctgggaagagtgacttttcctagagttgttattgcttgaatttttgctaaggaatttggttctcctttttttcaaaaacaacagaaaaaaaattaaattataatctaacaattaatactattcgtattttttttgtcaaatttattaatttaatatgtttattttctatcaattgactaatttaataacatctcaagtttgacaaattttgatgaaaaacactatcaattttaatgattgtataaatatttttaaattaaaaaaatttaaaaaaaattattttaatgttttaagtaaataaactaaatgtcaaattttatcaaaatacagaattaataataaactttaactaaataaaaatatcctcataatttaatgataaatctaaaaattatagataatatttttatatctaaaaactaaaaatctataatttttgtatctaaaatctagcttttaaaaaaaataatgagggatactaaaaactaatcaaatcatattaaataggtaaacagtagcaagctccgagtctttctgttcggtttttttttattaacttaactcaaaataattaattatttatgaaaatagctcaaattaaaatttatatatgaaaacgaccggttttctacaatgttcattggtgttgtttgatacatcgacggt

SEQ ID NO: 13830 - DNA, 631 bp, Gossypium hirsutum
tctcatgattgatttaaacagtctataaccctaaacctttgtactatcagttatagcaacaattagtgttagcatgttacttatgagccagtttatattcatcaaagctaaataattgtctaaattctggttgacatgctaatttttagtctcacgtgttagtttaattgatataaaggagttttaattcttctgtttattttccctcatcagaaatcaatttgggagtaacatgggatgaatatgattacgtgcaactttataataattaaaattattaagtttgaaataatctgcaaagttaattaggtttaatgagtgtaaatagtaaatgaaaattgatctgaggtgaactaagttgattgtagtttactcaatattcatcatattagcctcttttttttcttctaaaaaaaatcccaaaaattagtaagatgaatataaatattaggcacacacaatacacgtatggccatgcaccaatatagttttggtcaaaatctagtgatgagttttgtgaatttaatttgcattacgactattttactacaagtcgtctaattattcatcatcatatagttgatcctatttctacgaatatccctatcatagcgacttgtacatatgcctt

SEQ ID NO: 13831 - DNA, 621 bp, Gossypium hirsutum
tgcatatcattcatgggtaaatctttaaacacaaaccctagttcaaaacaattgtaaaaataggtaaatcttgttacgaggatttcaaaaatgtaaaaatcattaaaaacagggatagaacggacttacaatcgagcttggaagcttggaaaaccctaaccatggtttctccatgcaattttcggcctgggggttgaagatggacaaaaattggcttttaatttttgtttttaattcattttaataactatataaccaaaatgcccttaatgaaaaactttggaaacatgcctaaccatacccatttttgtccaccaacttaaccaatggtctaattaccatataaagacctccaatttaaaatttcataacaattggacacctttaacatatagaacttgcacttttttacaatttagttcttttaactaaattgagtgcccaaacgtcaaaattttcgaacgaaattttcacgaaatcattttgtgaaatcgtagaccataaaaatataatgaaaataatttttttctcgtcaaatttgtggtcccaaaaccactattctgactagccccaaatttgggttgttacaaagcctccccagatccaacgatacagatcaat

SEQ ID NO: 13832 - DNA, 634 bp, Gossypium hirsutum
tgtagttggccttgggtttaggttaatgggtttgtagtttgggttatttgggttaaatgtatttagttttagtatttggtttgtgatttgggcttcatttatggtttgggctggggctaaaaattgggtattacattactagcatgaagcatttctgccctattagtctttgtacggtgttgtataagactatctctaaaatagtggaagccgacttcaaaaagtattaaattgttgtatggataaagcgcaaagcacttttttctctagaaagttaataacaaataatatcctccttgcatatgaaattttagaggtgtataagcggagaaggcttgaaaagaagaagcatcttgctcttaagcttgacatggtaaggtatatgacagggtggagtgggagtttatagagaagatgatgttgaagatgagcttctcgacaatttgggtggattttattatccaatgtgtgagtaccatctcatactctattgttcttaatggtgaactggggagggtttttctctaagaagcgattttcgacaagggtatcctcttatcccatatttatttctaatatgcaatgaagggttgtcttctctaatgcgcatggcaagctaagatggattggttaa

SEQ ID NO: 13833 - DNA, 651 bp, Gossypium hirsutum
ctttgacaagtcttcaagggctctttgcaagcttaattagtcggctaataagctgatttgggtcagaatatggacggttttgggctgcccaatctttggccagttcagttcaatcagtttggttcaacttgaccaatttttccagaattagttaataataatttatttagcccaaattaaattgggtagaaattaaaattaattatattatgaattaatatacataattggaccgtcttaggctggaaattaattcacctcgatacttcaaattgcttctcggttttgtgcttcaggcagtgtctgccgagccattttttgccctttgcgtaaatctgtcgaaaataaccaaaattcatcaaaaataattataaaattaaataaatttcaacatattcatattttaagtgcactttaattattttataaaaataaattatttttcgacaagaatttaaccgaattcgcatgaatttaagttaaaaagagtatgaaaaagtgtataaatttttgtgtttccacaccccaaacttaatttgtaacaccccaaacccgacctagacgttatggccgaatctggcgatgtcacattgaagtgtttctcgtaaagtacgatattgtaaaaacccattctcaacttatcctctttga

SEQ ID NO: 13834 - DNA, 500 bp, Gossypium hirsutum
gcagtgaacgagtcaagtatcaaaggttaccctcacgcttccataagtagcagaggagctttcgaatggactattcagaagatcgttcgatccaatacttccggtttcaagcttctcttcctccatgttcaagctcctcatgaagacggttctttctcttttctttctctctctgcgctctttttctactttcttcacataaatttgaatttacacgactgcgctttctgtacgggcgtggttgtgttagggtttcgtagggtgtgtgtgagaattctattgctgtttttatgattgaaattcgttgaaactgcattgattttccgatttatgatgttatgaaagatgttaagtttgatttatcatttcttcaatcggtttggctactgattaatagaaggttaaattctgctattagtccctgtactttatgaaagttctgttttactccctgtactttttgaattggtcaattttagtacaagttgcagataaatccg

SEQ ID NO: 13835 - DNA, 557 bp, Gossypium hirsutum
  misc_feature (321)..(321): n is a, c, g, or t
  misc_feature (417)..(417): n is a, c, g, or t
  misc_feature (494)..(500): n is a, c, g, or t
  misc_feature (547)..(547): n is a, c, g, or t
gattgttgaacattaatttcaatgatttctttttttcttttcttttttttataaacaatgattcttgttaactcatgttttattagttttttttttaaattatagaatcataattgtaagtataagctaaaatatatacaattattaatttgtatattcgtgtgatgcgcaaattaattatgcgttatgaaattagttaaaaataaattttaagtttatttttcatttataaaaatatttttttaatacaatgcctaaattactcgtaacctttacatttataaatcgggggattatatgataccaatgaactaaaactcnattagttataaaatgtggtttggagaaataaatttttaaaagattttacaaaatatatttaatttagtcttgttgttgaacattaatttcaatttnttgttttttttatagaaaatgacctttttaataatttttttatacagtgactagaactacccataatactcattttnnnnnnnaaatgggaggaaaaaaaacgcgcttcaacgcattcaaattcaagtcntcctacatcg

SEQ ID NO: 13836 - DNA, 644 bp, Gossypium hirsutum
ttattatctcttttcaaataatatcatacttctttttgttaataattttaataattttttttatttttttcattgagataaactatatcggtagttactcaattataaaataatcacttaattatttaattttttattttttaatcatctaattattcaaattttcttttttggtcatcaactgttaaattactaatggaaaaatgatttgacagtttttaaaattgatataataataattttaaccttctatatttatatattgtgtcaatttaattttgattaaaaaaaacctcaatttttatacattgtgtaattttatttttttatttattgtagttttatttttatttgtgatattgagggttaattttttttaacaatatcattataaaatttgactatatctgatctttttgatataatgcttagaactacccatagtccctctcaacccataatgcgcttcagcacacttgaaccacatcctcttgtattaacaataatacccatgccaatcgagctaagactcaatcggcgacattgagaaaagataaattattatcttggattttgggtgttcccaatttttggtatatttccaatcacatttaattgatagatttgttttctaaacttttagg

SEQ ID NO: 13837 - DNA, 476 bp, Gossypium hirsutum
  misc_feature (448)..(448): n is a, c, g, or t
aacttctcctaaaatctatataggttgccatgatatggtagggcaacaatactacaaacctacagcactgcatcattaagttttcagctctttgttttggtttgttgttcaagttaccgaagacttacccctccaagattttgaataaatagttggaaagctagcttcattcatggttaaagatgtaggctaaatcgacacatttgggttcaagtaataagttgaacctttttttaaacaattctttgggtttaaatattgtggatggaataagtattttgggaaaactttgtacttctttttaggaatctcacttgactttagttttagtcgtattccaatgtgactattgaatatagagaggacttagataataataaataaaaaaaataacaacaaaatctttagattcaagctttgtaaatgaaaaaaataattttaaaaaaantttgcctttcatttgaagatccaacttg

SEQ ID NO: 13838 - DNA, 459 bp, Gossypium hirsutum
tcactaaaaaaagtaatttatgtgttacgattcatacaacttataaattattattgttcattttgatttattaggattcattttttttcaaaacaaatgtcttgcaagttaaaaggtactgtaagtatttatttttctagattaactctaatacataatctatgtaggatttatggctcgtccgagcatgacatctttcccactccatcaaaatccactatatattctcaatagcagaaaagtaatacgtacctcataatcaattttttttcagcctcgtaaccagttttgatattaaatgtcacgatggatcatgtttactttcatcaatctaacgagtgaaataaataatgattactagtatcttaaaatcaactctagcgaaaccctatacgttacatagaattgatgaagatcgtgcatccgtgggcaaacaacaaaagaatagcggaaggacca

SEQ ID NO: 13839 - DNA, 564 bp, Gossypium hirsutum
aaatggtgctcggtatattataattatacatataaatattgtgaaaacccgaactgaaaatggtagaatatgagaacctggttcatccatccatagctctgtatgccatcaacatattttctatttacaaaaatctatcaacaacagaagtattttttatctcggaaaacagtacagtgaaataaaataggtgaaccaaaagggatatagtacaaattgctactgagataaaaagtaattcctttttttttctgttttttcacattgtcaaaatacctctggttctaacacagttcaacttctgatatacttcataaggcaaagagcaaatgaaatggataaaaagaatgcctgtggactaccaaaaccaaagtgacttctaagccaataggtgatttcttgttcgatgcaatatataatcaaatctcaacacaactataggaaatttacttaccagatcaggaagaaggactcgagactctatgaattgaaaatttacaagacccatttttttatgtgataccattcggtatatcatgcctgacccgagcatttctctcatat

SEQ ID NO: 13840 - DNA, 546 bp, Gossypium hirsutum
cataccttccgaaatgccaatatatcggccaaaggaattgataatgtcatctttagagcaatgtcaagtgcatcggagagtgccctatcaccatagagttcaaaaacaccaaagtttacataatttccagcaagacctgccaattgtaggaaaatcacaagttaatttgtgatttcagaaaattttcaataaaacacaatatgcaacaaatacaacactgatggcgccagaaagaagtgcaaattacactattgaagtaaaagaaattgatgcagtaaatgtaaaacaaaacctccatgatataaaaggaaactttacacctatgttacataatttccaatagcctattttgctgataaatgtctgtataagccagttttagatcaaatttaaggaattaagaaacatataaggaaacaaaaaatatatataagaaaataagatgatgacatgatacgaacaaacaaatcattttgaccaatatagggtatctcagcattaaacattttttagctatcacttgaaactattcattcaactagcaag

SEQ ID NO: 13841 - DNA, 187 bp, Gossypium hirsutum
aaatatgagaataacaaagtggatcgagaaaagcccaaatgatttacggtttttcaaatagcaacttccattcttattttgatgcctatgctcaacttctaaatctttaaatcattttaaaaggaaaacttttcttattggttatttagtcctcttacatgaatgtgtagaatagtgtcacggctgt

SEQ ID NO: 13842 - DNA, 636 bp, Gossypium hirsutum
caccagaggacttctcgtgttcatcgaaggttagtgattttgcatatgaaggtttccatcttttttggatatcttttgttgcatgatcatctatctatctatctatctatctctagatatatatttggcattcttggtattatgtatgttcttacttcacctatatttggaaggaattttttgaaccttccctacctaacgggtgggaatggatatcaacatggactatcgataaatcccaatttgttgatgacgatggctgggcttatgctgctgactatccaaatcaatggcccccaacttcttcgaagtcgcatattaaatctggtcatgatgttgtgcgtcgaaggcgttggatccgaacaaaacaactaattgctgagaaagaaaaatgttgcgtaaagaacgactttactaccataaaccctggatgttctactgttttatcatggggaagtacttctaaagcatctgatcagtgtttacgcattcgtcctagtgctgattatcctcaccccccatatgcttggggtcataccgttgttgttgctgtcgcttctaattttgcaagtggaaaggaccagccttttgtagatcaatgttatattaaaagtacttcaccacaagggaagcaaa

SEQ ID NO: 13843 - DNA, 677 bp, Gossypium hirsutum
gtggttattacgactatcattgtgacatactctattactcatcatatttaaagttgacaatttctgaaacaaaacctttgggctttgaataatgttgatattgtggaactatgcaaattcgtctttaaagatcaatccattaggagcaacttacctcgaagattggattagattgaatcaagcaattggatcccttgaattgtggagattggatcgggatagcattgaagatatatctctaacaatttgctttacatttgtctttattattatattatatcttgctattttagatgttggtttgatagggaaaattgattgtaattggtttagtatgttagcaagtcttgaaacttttatatatttaaaagacttgtattaggtttctactgagtattttgggatgcacttttgttcattgtgaaatgcatttttgagagttcatttgagagaacaaattttgtttattgcctaagttctaagggagagaacttagaggtgagtgatctacttctttaggtataaaagcgaggtagctataccagagcgtgatagaatttgaatcacttattgtactgggttcaaagataataaatttactcactaagctaggctttgaaaacgtagcgaaactaaattgtgtaaacaatttattctgttcttattgcagtgccaca

SEQ ID NO: 13844 - DNA, 624 bp, Gossypium hirsutum
  misc_feature (476)..(481): n is a, c, g, or t
  misc_feature (490)..(490): n is a, c, g, or t
  misc_feature (495)..(499): n is a, c, g, or t
  misc_feature (501)..(503): n is a, c, g, or t
  misc_feature (506)..(507): n is a, c, g, or t
  misc_feature (509)..(510): n is a, c, g, or t
  misc_feature (513)..(521): n is a, c, g, or t
  misc_feature (528)..(535): n is a, c, g, or t
  misc_feature (543)..(544): n is a, c, g, or t
  misc_feature (546)..(548): n is a, c, g, or t
  misc_feature (554)..(556): n is a, c, g, or t
  misc_feature (558)..(558): n is a, c, g, or t
  misc_feature (561)..(562): n is a, c, g, or t
  misc_feature (573)..(574): n is a, c, g, or t
  misc_feature (589)..(590): n is a, c, g, or t
  misc_feature (595)..(596): n is a, c, g, or t
  misc_feature (603)..(606): n is a, c, g, or t
  misc_feature (613)..(613): n is a, c, g, or t
  misc_feature (618)..(618): n is a, c, g, or t
attcactatagagaagaaccatggggtgtactgactacttatgaaagctaagataatcaagtcctaagtacttgattcagttcactataacttcaggtcatgatagcataaaggcgaaacactcttaaggaaacaaagtcatgcattttaattccttgtaaagaaaagaagaccctaaaacattgtcaatgagaacaataaaacataatctcagactttgaaaaaaaaacgaaatggaagtcttaaatattacgattttaactgctaaaagaaaactaaccttaaattcagatccttccttggattccgaagtagaatttacctgcaaccctgagagatcaccatatactccctcaaaacaattacaacattatccttaataaaagagcttactttatggaaaattatgggaaaagaacaaaattcttccgtaaaaaaaaaaaacacccccccccccccccccccataaaaaaaannnnnncccccgggnggatnnnnntnnnagnngnnccnnnnnnnnnaagtggnnnnnnnngcgcgtcnncnnngagggnnngntcnncgaccccgggnnctccttcgtcttccnnctccnnttctttnnnntttttantccanaaaaaa

SEQ ID NO: 13845 - DNA, 622 bp, Gossypium hirsutum
cattgatggcaacaaacctaagtcacaaggcattcgatagctataattttggaattcaactttccagggttcgaaacccttagacaatgatttagaatgatgtgcaccgaggtcaaagacaaagtattctcttgccatttcaatttgatgtgacaatttcaagattagcatcatagaaaggatacgatgcaattttaagtcatgatcatgcaaaacatgttcaaaccttttaaaccacaatatggagcaatttccagatttgtaatttaaattttgactttgcaagccaacaatattcacatgctttctctttacacttagcgataaaattcgaaaaagatgaaaaagttcaacacatttattccaaacaaaattacagtactcacctttacttaacaacatcttacgttcgcatactccgggcttaaaaacatgggttgggtcacatgttctgatgtgagctcgcctatgatccaagaggagctcgagcaagaagccatcgagatacctagtggcacgataatgcgagctcgtgccaagtaatttaaggcggctatctcagctctagtggaccgaatatggaaaagtgacagcaaagagcacaaggacgagcctaatagtt

SEQ ID NO: 13846 - DNA, 683 bp, Gossypium hirsutum
ccacacaatgagcttcctttttctttaaacaaggagctctaattttcaatttatttgtgatgatttcattttgtcacatgttttatttttcatgtattaggtgaaagagtgggaagattaattttagtaagtttttcgcatcaaacttccaagcaagttttagaaaagtaccatcccttcaacccaatcacgtagttttactgtgttgaaattataatgtggtcagggaatggtggtcaaaggaccgaagggaaaacaaaacttccaatttgggtatgatgttcaactttactaagttaaggatttatttgaacctttcggtggagaaataacatttaaaaacctcttaaccaaatacgttaaacaaagacacttatggataagaactatgtgattaagtatttttcatttttcattttcacgtaggttgcatcgttttattgtattctttttatttatattttgtttctatccatttcgtattttaaaatttctttcgagtgtttttgttggtgaaagacaaaatcgaaagagcaaaaattggcattaaacaaagtctttgaattaaaccaggcaaaaatggatcttataatttgttgttgattttttaaatatatatattttataatttgtttctaatttaagaaagagtaaattacaccgacaatcactcaactttaaca

SEQ ID NO: 13847 - DNA, 507 bp, Gossypium hirsutum
gatagtctctcgcttcaaattcagccttcttcttctcctttccaagttcttccgccttgcaggctcgttcgactagtgttacgaattcttttatttccaaaatacccattagtagctttaaatcttcattcaatccttcttcgaatcttttgcacatagcaacctcatcagctacacactcccgggcatacctactgagtcttacgaattcatgttcgtattcagatactgtcatacggccttgcttgagttccaagaattccttacgcttttgatcaatgaaccgttgactaatatatttctttcgaaattccgtttgaaagaagtcccaagtaactcgttcgtttgggactatggaaatcagggtcctccaccaatagtaggctgagtcccgcaacaaggatatagcacactttagacattcatcgggtgtgcatgacagttcatcaaacacccgaatggtgttatcaagccagaactcggccctttcagcatcatcagtaacta

SEQ ID NO: 13848 - DNA, 554 bp, Gossypium hirsutum
cttggaaagaggatggcagttatctcctgcaagaaattcatgaatgactccattgacctcaattctgctacaaccttgttctttctttagtccagttactctcatgtgcttccttaatctagaaacaccatcccatttcccagttttggcatacacattagataaaagaacatatgctccattattttcaggatccaactcaagcaaatgcctacaagccagttcagcaagctcaacatttccataaatttgacaagctccaagcagagctccccacacagaatcactaggaagtattggcattttctcaatgaattcaacagcttcttccaaaaggcctgcacgaccgagcatatcaaccatgcaagaatagtgctggataccaggccgaatcccataaactggttccatctgattgaaaaaggtttttccctccttcaccaacccagcatggctgcaagcacacaacacattagtaaaggtcacagaattgggcttgatcatagtttcttgcatcttagagaacaaatctattgcatctctcccttgaccaa

SEQ ID NO: 13849 - DNA, 477 bp, Gossypium hirsutum
ttagatgacagcatgcacgagattagccgttacaattcaaaattttaagaaagattgatcccatcctcaacctatatagtacacttcagttcagatctagtagctcgtccatagatatccttctctctgtcaaataaagatttgcacttgagaaccagaatcacttaaaagcaagtaaattcaaagcagaagaattgattagatattaacagagtatcacgcctacaaatatctgaagttcccagaaatggacaagtatgctaacaaacattcgattaaagcctcattctattgtcacataccataaaagtcgaaactttttatttgtgataaatgaagtaataaacagacaatgctaatgacaagaaacatttgatagaaccctcatgccaccatcagaagatctattcattaatcaaatcaaaaaaggaaaatcataaatctctaaagtttcaattgcctacactgatgaacaca

SEQ ID NO: 13850 - DNA, 653 bp, Gossypium hirsutum
gaatggtccctaatagttggatctcgtctaatccacttaaacctctgattgacatggttgttcttgcacatcaagaaacagaccctcaagcaaattcctccattcttccccacaaattcaccgttgatcaatccaatgccttgggcctctttgaccctgatagagctattgacctaatcaacaaaactacaccattccaaggtggacacgataaaatcgtttggaaggatgactttaaagatcttttttcggtcaaaagtgattattcacaaatatgcaaaagtcatcgtgaagtcacttctcacaacccacatcagattaagatcaccatcttcctctagaaaacttgcaaaactaacctacctactaaacatttacttgcgaggagactatggataaatgattctctttgccccctttgcaaagctgatagagaaactctggatcatcgcttcttcaattgttctttcgtgagagcagtttgatttggatccccctgaccttttgatttgattccttagacgacatccccatttcaagatggattctccattggcttcaagaaaatgatatccaagcaaaatcctcaagaagtatatacactgccatgtcctgcaccctttggatcatttggaaaccaagaaacaaccaca

SEQ ID NO: 13851 - DNA, 659 bp, Gossypium hirsutum
taagatctggtaattcccaccaggtccgcccatatttggcggatagttattcggaaatatcggtcatatcaatgcaaagtaaatcggtttaatttgattccatctccattttattttatttatatttaatgataaagtatatacattttcatataggaataactttttaattggttgaacctaatttatgaacactttcaatttaaaaaataaaataaaagtaataaaaagcgtgcaagcaataaaaaagacagacacaaaatatcattaaaagataacatgaatatgatataaaaataagaatatttaaaaattattaaataaatagtgagagatgagaggtagttgcactctcatcaagcagtgtataactcactcatttaaatgcaccacttcccacgataacaaagttatagtataattaatatttatgaacttaattctaattttgaataatagtaagagcaatcttaccttgccatagtggttgtacaaaggagaaagatctgaaaataaagatggaaccccctgaaggcacaagaggacatagtatcattatttcactcaacatactagtaacaccagtcaaactagcacaaaaaccatctcatttgcttaatacctttgttagaagaggctgaatgtaactaactgctgct

SEQ ID NO: 13852 - DNA, 1001 bp, Gossypium hirsutum
  misc_feature (656)..(776): n is a, c, g, or t
  misc_feature (778)..(825): n is a, c, g, or t
  misc_feature (827)..(829): n is a, c, g, or t
  misc_feature (831)..(891): n is a, c, g, or t
  misc_feature (893)..(893): n is a, c, g, or t
  misc_feature (896)..(898): n is a, c, g, or t
  misc_feature (901)..(906): n is a, c, g, or t
  misc_feature (908)..(916): n is a, c, g, or t
  misc_feature (918)..(929): n is a, c, g, or t
  misc_feature (936)..(937): n is a, c, g, or t
  misc_feature (946)..(946): n is a, c, g, or t
  misc_feature (950)..(959): n is a, c, g, or t
  misc_feature (961)..(964): n is a, c, g, or t
  misc_feature (972)..(974): n is a, c, g, or t
  misc_feature (976)..(976): n is a, c, g, or t
  misc_feature (978)..(990): n is a, c, g, or t
  misc_feature (992)..(993): n is a, c, g, or t
taaagtttgtaatcccttttctctagccttttatctaattctaattttattattattcctgtaaatttgttttgcggttatcattgtgattctacctcagtttttttagtcatttcttgactcaattatggtctagttaacaccatgataccactttaattatattttactatagtatagataaggagtttacaagtataattatcgatataatcataaatataaattaaattaaatgtataattatttagaactataatcaatttaccatgaagtacaataaatcaaaaatctaaatgtttttatacttaaacctaaataactctatataaaatggtgagattctcatgatgatatagtgtttgaaactcgattttaaaggctcaaaatcttaaaatttgtcaacacggtcaaaatctcattggataattttaaataatttcaaagtatataatctaattctttttaatatttggactgggataattcaaatttgaatgatatataattcaacctaattcgaaccagataccttcaattttctaaaagacttcggtttttttcgttcttagcattgcatcgaaaagaaatgattcataatatgataaagatgtaagttaaaatagagtctaccttgctcaagtactgtctgaaannnnnnnnnnnnnnnnnnnnnnnnnnnnnnnnnnnnnnnnnnnnnnnnnnnnnnnnnnnnnnnnnnnnnnnnnnnnnnnnnnnnnnnnnnnnnnnnnnnnnnnnnnnnnnnnnnnnnnnnnannnnnnnnnnnnnnnnnnnnnnnnnnnnnnnnnnnnnnnnnnnnnnnnannnannnnnnnnnnnnnnnnnnnnnnnnnnnnnnnnnnnnnnnnnnnnnnnnnnnnnnnnnnnnnanttnnntannnnnnannnnnnnnntnnnnnnnnnnnnatatatnntaattatanatannnnnnnnnnannnnaatttttnnntnannnnnnnnnnnnnanntattttta

SEQ ID NO: 13853 - DNA, 590 bp, Gossypium hirsutum
caagccactcttgagtcagtcagtctctcaaggtattattccacatactagttaggtttttacctaattaatagtattcacttttcttgaattttgaaaatacccttttggttttttctttttttagttatgaaaatacctttttgtttattaagaccttaccaaaaaactatataacaaaataaatacaagaaagggtactctttacattttgactttcttacatctatgattaaaaaaggagagaagtaggtgcctagaattatggatccaacaaagattcattatataaaaatatataaaaataataatatcagtcaactaaaatagaccgaatcaattttaaattttggagtcgatattgtttggaggattttatctgaatattattcttgacctgaacaggacaatactcaaaccgtaaaagggacggggatacatgtagtttatacaaaataaaaactcagaccgtaaaatggattgggatacatgtggtttatacaaaataaaaagaagcaaatctatcctgattggtgtaatcgtatagtgggcgtcgccccctaaggttaacacagtactttaatatccat

SEQ ID NO: 13854 - DNA, 651 bp, Gossypium hirsutum
attggctgaatcaacgaactgatggcctgaccagttcgaccatcggtctagttctaaaaacattgattttttttaggtattttacatgcaagattttcaaaaccaggtcgatggttgaacctaaaagtgctcatgggtcgccttcgggacaagcctaagcatgatattaatatacgttttgcttgtccaagctcggcgcagctcgaaatatggatttaaaattttatccaaaccagtccatatttgcaaaagactaacccaatcccattttaggcccacccatattagttttattttttaaaaatatttatattatattattttaatatttaatagttttatacattttttatctatttaattattttatatagtaatattaatattattttaatgtttacattagagtaatattatgtatttaatataagtttatttttttaatgtattctaaattacataatataaaatattataaacttaaaaatgggctgagtcaggtcaggtttgaacattcaagctcgaactcgacccatattttaaatgggcataaattttttgcacaaacccatcttttgagcctaatatttttacccaaatatcgggtgagcctttgagcctagacagataatccgatccatgaacaggtct

SEQ ID NO: 13855 - DNA, 563 bp, Gossypium hirsutum
aattgagagagccactcaaaacagtaatcagtacaacaaataaaccaatataaacttgattaagacaactaacagggattaaaatgacgcagatttcagagcacaacctactctggggtatcataaagacaagttaagaaccccagcatttggcccattagctaagggtgttcaccccatacccaagccgagggctcatgtcacagtaattgtcagatagtagtgtgtgcatggcagcaatttgcacctatcagtggtgtgtgagttgtaccaaaaaatgataagttcaaagctttgaggcttacagcaatagcatgtgtggaaacaataaactttacttagcaagattgtgctaacaaatgcagctttcatatgaaacatggacatgcctaattaccaaataacttccattccacaaacaatacaatttctggaaacagaataagattctggaaaatatagatgatttttggaagtaaaaatcaatcaacaaaaaagggtaactacaattaaaatgccagtcttaattcattcaaggtaaatggtatttcaccaagcagcta

SEQ ID NO: 13856 - DNA, 694 bp, Gossypium hirsutum
gttggcttaactacccattgcgtagcaattgactattatcaaactctgtccttttacaccaagtggtttgcttgggcttcatgcttattcttttagccttaattcttcctcttataattaatttggtgaagaggtatacaaatcagacacaagtacttcagtcactttagtagcactaaaagtattacgaaagcttctatattgaaaattagattacattttggctcatataatgagaaaattagtcccagtatgttagattaaagagcaaattagtcatcttattaaatatttaattcatttttattgttaaaaactagttcctatatattagcataagatactagtggcatgtcatatgtcactgtctggttattctgtccgatacacccattattaattgtaaaaaggaatgaaatttttaaaacaaatgatcatcttgctttttgatctaacgtatagggactaatttatcaattttcagagtagaagaggaaaaatgcaatctaactcctaataaaaggttgtacttttaccctttaatagcttttgtgataatgctataatagcttttgtgataatacttccatgtttagccgtgatggagcttttttaagagtttagtcagcattataacaactagtgaaatatgattttataaagtgtgttacttgtgaaattaaggtccctctga

SEQ ID NO: 13857 - DNA, 605 bp, Gossypium hirsutum
  misc_feature (530)..(533): n is a, c, g, or t
  misc_feature (573)..(575): n is a, c, g, or t
  misc_feature (585)..(590): n is a, c, g, or t
  misc_feature (592)..(600): n is a, c, g, or t
tcgttcgtcttgagtcaaaataattatattcgttcaatgaagatgtttatggttcaattaaggtttaaaggaaatggtgtgtaatgtatttcggctaagaaagaaagtattacgttgaaaaggtatggaatttcggtttaatggaaaatggatggattggcttaaaaacaagaaagaaccaacacaaagggtgagtgttgacccgaatcttatatgttcttaagatggaagatgaatgatgtaaaaggacctcgacccactatctatcaaagataggaacctcggtatagttgaacgccacactttggttgaaagtgataagttcggtttgcaaagagcagggttgacgccactaactagtagataagccaacggagtctttggacaaaattgagagaagaaatctcaccaaaatattcagattatttataaaattggcaaaaagtccttttacaaattaacaagcaaatatttatagtgtagcataagctagccgaatagtcatgcttaatagctaagaaaaatcaagnnnnttccagaaataatttcctagaaagattcggctgaatggannnccaatggcannnnnngnnnnnnnnnaaagg

SEQ ID NO: 13858 - DNA, 697 bp, Gossypium hirsutum
tgaattatggaaagggtgcagagaaaagtgaaagtgggttagttaataaatgaatgatttaaaactctaacaggtaacagtgcatgtaaaagtttacctccgtttagccaaaggacaagtggtttagaagcagggatggtttctgcttcaacaaagtagtaaaacagagctctctgcctgtgcggcttctcatcatggacggtaacatagccagagaagtgttggaaactgactttgggttggccaggcaaagctactattttatcagctctggagaaacaaacatgcagaagaagagtaacaaagcctacccatttcccagatttcatgttttacaagaagggtgtggtaaaagaatatgactaagccgatctcaaatactcaattattaatatcacgaaaattattgacaggcaaaagatactagtggcaccccaccatggaaaatcggatgaccccgggccaactcacaataaccctataaattaactgtaaaatctgtgcatacacttgacattataattctagttattaacactttacagctaaaaagaaaaacaatatagtactaatatttaaaaacagaagattgagttggtgccaggaagtgataaaaatgaattcagtccataaattcattaaattgattattgttcatgtttagaaagtgaagaacacggaagaacaaacctaaagg

SEQ ID NO: 13859 - DNA, 651 bp, Gossypium hirsutum
gcggctcatatttagaaagtatgtggtggacctggggtggagagtcagagtgtcagttagtgttgtttgttctcactcgcagaattcaccactaaatggggattatcacaaatgtccagccattcatcctgttatggaatatgttaagttgcttattcactggttggatgttgctgtggaggaaggagagaaggatctcgctgaagcatgcaagaatagttttgttcatggtgtattacttgctctacggtatactttcgaggaattggattggaattctgatgcagtcttgtgtagtatttcagatatgaggcatgcactggagaaactcttggagctggttgtgcgaataacttcaatggccttatgggttgtttctgctgatgcttggtatctgcctgaggatattgatgatatggttgatgctgatgctttcttactggacggtcctgatgaaatggatgctgctttgccttcaatcgaacaagaagacaaatgcacaaaatctattcgggatgcaagaccatcagatcaggttgttatggttggctgctggctggctatgaaagaggtactaagcttgtttttttgtgctattgaaaataatacttgttatttctgctttttgctgaaatggaggaacaataacag

SEQ ID NO: 13860 - DNA, 573 bp, Gossypium hirsutum
ttgattgcatgttaaaccccaatttcattatgtttaattctcactggtattttacaaatacacctattgattgagttgataaggttgattttggttcgactgaatttcggattcatgttaattcaagttgttttgagtgtagattacttagggttcatgccattcgggttttaaggtataggtttttttattcaaatcattataagtttgaatattttgagttttaatcacttcaaattcaagtcattttaggttaagattattttaaattctaattggataggttgaaattgttgactttgtatagattaatcgaactaagcgggatttgaattcaaattgacggaattgaattttcaagttcaggctaaaattgactcttgaaatctatttaaaagattatcatattgatattgttaaagttatctcaagattcaataggtttgtagcctaaagtttagtttagatggatgatacgtttacttctgataaggttaaaaacaatagtgatagtaagattaattattataactataaagtaaaagattctactgtaccacagatacaacccgt

SEQ ID NO: 13861 - DNA, 551 bp, Gossypium hirsutum
tgctctctctatattgaactcctcttgtaaagttagctgctcaacaataacgtcacgttatttccatgcaacgcaagtaaagtattttgataatttaataagtaaattagataaaaaataaattgggtttaattttttactttttatctttttttattattaaaaattagtttttatgcgtcaacatgatatacacgtggcatgtcatatgttattgtctagttattttatcaattataccaatttttacaatataaatgaatgaaatttttaacagaagagatcaatctgctctttgatataacttaagggcaaagctagaaatttttttaagagaccgaaattaaattataatttttacgataataaaaatataattttgttattttaattgtccatatttttataatttttaaaagattaaattaaaattttatcatttttaagtgatcaaagtgtaaatttatctttattaatttagaattttaaatgatctaaatgaaaaattttcattttaggaagattgagaccttaacaatctcccatagcag

SEQ ID NO: 13862 - DNA, 622 bp, Gossypium hirsutum
  misc_feature (17)..(18): n is a, c, g, or t
  misc_feature (582)..(585): n is a, c, g, or t
  misc_feature (605)..(606): n is a, c, g, or t
gaaacaagaaagaaggnntaaaatggtaaagatagaataagttaatgcaaaagaatgggaggtgtctttgaaagggaagaaatcaaaagagtaaatacaataatggtgtgacgatgatcgaggaggccctgatggttgaagggtttcagaaactccaaccgtcatcgatgtagcttaaggttagctccttggcatatgactctaaaaggttctcttagaggattttttttctttttctttttatatataatatttaaaattgagtgactaaaatataaatttattaatagcttattatcatttaagagtaatttactcaaaatattataagcgagaagacttaaattaaaaattaatttatcggaagactaccgcaataaaaccgagctgtaactacaactcccccttcctccgacaggcttttttccggtcactcgctctttttttttcctgtaataatcgctttataatatactaattatgtcaatgcactttctttaattttatcctatctttatattccattcattctagggtttttcaattcctccccaatttcactttcaagttttttttttatgnnnntttgttagggtttctctacnntcttcttgattttccc

SEQ ID NO: 13863 - DNA, 523 bp, Gossypium hirsutum
  misc_feature (469)..(469): n is a, c, g, or t
aaatggaaggacccaacacagactacccgtattaagaattcatgtctacaatcaatgtcagacatatatatgaatcaattataataattaaggtaatatagctgttttgattgtctataatcaaaaaaggctgaacaaaatctcaaggtaatgtgttttgttttgaaaagaaattatgatgggaacataacaaacaattgaaaatagagaaaaaccatgaatcagtagcaggttattgatcaacttcctggcattatatttattttcagacaaaaaaaaagcatagtggactatgacagaattgagtagttaaaacaaacaaggttatgcttcaatttatttattttcctctaacttgaaatataatatatagaatataagaggagtgagcaaaatttgattcgatttgaaaaataaaaaaaatcgaatttcgagttaatcgaatcgagtaaactcgaataactaattngagtttgagttgaattttaccattcaaataacatatgggtgtaaataccccttt

SEQ ID NO: 13864 - DNA, 450 bp, Gossypium hirsutum
caatgaggcttcctttagtttctaccctattcttcattgtgggtggaaatcggtcaaatgcaaggtaaaacagtgcggggttaatctattatttggaaattcaggagtcaaagtatgagagcttaatgacgcttcaaccttattttgttatttcatctatattgaatttcaaaccctaattatgttgataaaatatttaacatattacatatttatcattggttttatttataattgtaactgatttttattaatgtttatttttcgctaaattatatatatcttccttttcattttttatcatttaaacgaaatttaatgcatgtgtaaatttatttaaatataaataggcttaaatacttatttaatccttaaatctatcactttctcttaagttggtatttataattttttttaagttagtattgaactttcattccatcgaaagtt

SEQ ID NO: 13865 - DNA, 571 bp, Gossypium hirsutum
  misc_feature (470)..(470): n is a, c, g, or t
taaattctaatttctgttaagggaaggaaaagaatgccagtatttcttttttaaacaattatccgcaatggatttggagtgagaccattcacttccaccctcaaaatttcttaaaccacacaaataattttctaaaaaaagaattagcagggattgattgaagaattttactaaacaagagtcattatggtttgaaataaatttagtattagtcaactaaataaataacatatgataatgaaaatcaactcattgattttttccatctctactttctttgaagaattgttaatctaatgctccaatctcgcgacatgctttttacttattattgttaataatctttttaatttaatgttatttataatgtttaatcttaatttaattgatttaatgctataataattaagtcacaaccattttaaagtgattagtgtaatttagttaaaaaattaattttaaaaatttantttaatatcgatatgatcaatgaaaaatactgtatgttttttgcaatatattttttatgagatcacatgcaagtatatttttctgcttctttcatgcatgc

SEQ ID NO: 13866 - DNA, 616 bp, Gossypium hirsutum
  misc_feature (48)..(53): n is a, c, g, or t
  misc_feature (521)..(521): n is a, c, g, or t
atcccacttattttcctatgagaagatttttaattttcatttatgtgnnnnnnctgaattgatgagccaacctgataaagattattatcatgaaattggggtagattttaatggtctttatccaatcatgttcctttatgaggttaaaattgtgtgcaagagcattgaagatgatgtgggtgctttggactagcttttaccttaccttgtatagagtcgttttgttatggtaaaagggcagcgacaaccatggcagaaagtatcgtatccaccctctggtcattgtcatcagcaaagatagcctaatatgatccactcggacagaaagcaagtccagtcaagactcatcaaccacgcttacatcatttcactagaataggcctaagtacaactttgtttttacatacaagtttgttacaatttagaccatcaataattcatgctgaaaaaaaaaacttcaataaaaatcatggtaaaaaaaaaaaaactaatttcaaatttttcccaaaattggaaatatnggatggaatttttgttccctttacccccgatccaaaaaaaaaaaatttttttaaaaaaaaaaaaaaacccccctttggccccccccctttaattt

SEQ ID NO: 13867 - DNA, 635 bp, Gossypium hirsutum
aaattgttgtgctcgacaagcttgattactgctctaacctgaaaaacctcctcccctcccagtcatcaccgaactttaagttcgtgaagggggatattgccagtgctgatcttgttaactacctccttgttgccgagtctatcgacacaataatgcattttgcagcccaaactcatgtcgataactcgttcgggaacagctttgagtttaccaagaacaatatctatggcacacatgtcttgcttgaggcttgtaaagtcactggccagatcaggaggtttatccatgtgagcacggatgaggtgtatggggagacggatgaggatgcggttgtaggaaaccatgaagcttctcaacttctcccgacaaacccgtactcggcaatgaaaactggtgctgaaatgcttgtaatggcgtatggtaggtcatacgggttaccggtgattactacccgtggaaacaatgtttatggtcccaaccaattccccgaaaaattgattccgaagttcatcctcttagcgatgagagggaagactcttccaattcatggggatggttctaatgtgaggagttatttatattgtgaagatgtggccgaggcatttgaagtcattctacacaagggtggaagttgg

SEQ ID NO: 13868 - DNA, 682 bp, Gossypium hirsutum
tccctctaatgtttatgacaaattcaatataaaatttctataatcagagagcacttacacataaatcaaaccaaaatagtagtagtaacctttatcataactcattaacatatgccagttaattacattcatacaataccatatttatcctcaagaacatttttatcaataaagaatataaatatggcaacaaattaaaggatcaatttgattgttgaaagagttgagtatgtttattgatttttgaacgttaagaaaagagggaataaggaccaaagaaaacaggaaagaaccaaatggacttcagtctccaaatttaagtaacatgtgaaagacagacatcacaaagagatcctagaacagtgtaggattgaagcacaagcaataaagtagctgacgttcaaagttcatactgaagttcaagaattcgatggaaagttgcatttatgccagacccaaacccagtagggaaatgatgttggtcaacagatccaaaaatcttcacctaaaacaataatattttgaaataagataactcataaattctccaggtaatgaagaaaaagagaggaacaggaattctaataggcatttacagtttgatcggccactgaaacatgaatgcaacaattttttgttctatcacaaaacccatatcgataaagatcaccatagtcttcac

SEQ ID NO: 13869 - DNA, 689 bp, Gossypium hirsutum
acccacagcctcacatttctacgccagcctccgcttcctttgctgccgctgcggcgtttgacttcaaaccggccaagcgtcgcggcagttacaattgtggcagatgtggtcttcctaagaaaggccatgtttgccatctcaacaatagcaccaaccctacttcgatttctactcctacctcatctccatctgccgttaccgtcgaaaattcctcctccgcctcccgtccacctcacgctccacccgtacgccagtcttacacgcatctccgacgtgcgctttcctttgacgacatcgaaacccgcgctgactcgccggaacacgatttagatgattctgattctccctacccgggtacagatcttgatccggataatgagatggtctctggtgggttaccggctgggtgtttgtgggaggtcttgaggagattgccgccggcgggtcttttggcggcggcgagtgtgtgtaaaggttggagggaaacgacgaagaggttgtggagggcggcggaggagttgagacttatggtcccacctaggggtcagctcaggttcatcggatcggttttaaagaaatgcccgagcctcgttaggctttctctaaagatggaaaggttcggcctaagccaacgttagacggatctaggatattattggttggatcggttaataccaatgaagatcgtg

SEQ ID NO: 13870 - DNA, 619 bp, Gossypium hirsutum
acttttccccttattttcaaaatgtctagcccttcattttcctcccttgatcctgatagttggatttgtagtaacctaccgatagttgtaaattggtgtatatcgatattggagtatatcattttcaaatttatccttatttaaaaaatatttaatatatataacatgtagggtgcgctttgtatttttcagtcaaacagatggtgatgtcacgacgagaaacttctcgatattgagacaacagacgatgttataatgacacgaatgaggacgttgcaagtttctagataaactctaattactctaaagatattttagtataattgagacaccaattaaaaaacaattaaagatgtagtactacagtgcttttcatttgaggacaacaagatgtaatcgcaaataaattttgatgtgaattttttcgtgataactatgaagaaaattgtgtaccccttttgagataactctatgagagttgggattttgtttttgaggtttaaatttagtacatttaaatttatttttttctatattatacttccgtttatttacttatttagtgaaaagttagaaacctcttttgcccatagtttttatcgtcttcggaggaagtttc

SEQ ID NO: 13871 - DNA, 675 bp, Gossypium hirsutum
tgtgattaattgctctcctcttccttttgcctaggctggtattttgtctagtttagatgcactggtgaaggattttgtggctgccaacaatgatgagaagaagacggtcttctctaagatcgaacaggaagttgagaaactgaaggggtccagcgagaggtattcaatttctctctcaatagtcttctccgaaggagaacttcaatccctagtttcctgttaaaactgttccattgtctttacttcctctcttgtttctggttgcaggtatggaaagatatacttgaaagctgctaaaagctgtttggagaaaggtgctgattatcccaagaaggaaatcgagcggctgcagcgcattcttgacaaggtaaggattacagttacaattaatcactaggatggtgtcctgaaatcatgtttgactttagatttacgggacatgtaagctcatattgctgcccccgcgggagaggtggttaaaagacaaatttagttatacaaaacaatagtttccatcataagcatgtgatacatgagatggctctaaccatgagttttaattctttgttaccggtgcagtctataagcccagcaaaagcagatgaattcactctcaagaagaatatcctatcaacatttatgtgaacttagctcactgaatttcactagtctagt

SEQ ID NO: 13872 - DNA, 744 bp, Gossypium hirsutum
  misc_feature (659)..(661): n is a, c, g, or t
  misc_feature (665)..(665): n is a, c, g, or t
  misc_feature (670)..(682): n is a, c, g, or t
  misc_feature (687)..(690): n is a, c, g, or t
  misc_feature (693)..(696): n is a, c, g, or t
  misc_feature (709)..(712): n is a, c, g, or t
  misc_feature (714)..(714): n is a, c, g, or t
  misc_feature (716)..(719): n is a, c, g, or t
  misc_feature (722)..(725): n is a, c, g, or t
  misc_feature (730)..(732): n is a, c, g, or t
  misc_feature (735)..(737): n is a, c, g, or t
tatgcctgaattaacaggaagggataggcgacgtcttggggcatcgacaaagcattgaagatctcctaaacacatgtcaaactcagaatggcctttagaaagtttgtacagagaaattcaagctgcgatatctgggggatttaattcccctattattttttatattgaattttggttgattcttggaatatttttctcttttccaagatatacattcccaatcaatttctttactatttgtgataacttattcatttttagccatgttcagaaccaaatttattcttatctattgttatgaccttttctgcaaacatgttgcattagaataatgattaatggactaataaaactttcacaaaagaagttttgtatattactctgaaaagtttctaaataatatagtagcctgaaacaagactattgtttagaacacaccgaatttaaaggttggaaatttgagaaagaagagtctaaatttggactttctctttggatttcattgtcaaatgcattaagtgacaagattccatgttggtgataaagcttaagtaaacaagcaagcaatgatcatcaggcaataggaagaggttacctcggagaagagagcctccatttgcacaagagtctttggtacgacacactgagaatggtttaannnattnctcannnnnnnnnnnnntcccnnnnccnnnnccccccccccccnnnncntnnnntannnnttacnnnccnnncccccac

SEQ ID NO: 13873 - DNA, 693 bp, Gossypium hirsutum
  misc_feature (677)..(680): n is a, c, g, or t
  misc_feature (684)..(688): n is a, c, g, or t
atttaactccagtttagtgcgtttttaacttttttattgtctcatgttagagtatctaatatcaccgccaccattatttttacactaactgcatataaagatactgcccatccaaaagggaatgtcctaatcctttgttccaaggcattgcttaactttagcttttacatattttttaaaatttatttttcaagtataagctatcttttttgtgtggatgtgaatataaaacttaaagtacaaaagaaatttatgattaattgccaaaagaaagaaaatggaagaaaaataatcacacaccaaccctatattcctaaaattattatcattattatataaaaatataccctttgacctatgctgacccaccgacactccctaacccgccaaaaaattcccggcgaccaccctaccattttcatgccgctacccacgaattataaaataacaataaaataaaataataaagggtaataattttagttacctcttctgggtttcgctgtagcaactttgatagtcttcttttcttctttagttttctcttcaggcgggaaaagtacaccgtcgataccctgcaccgagatccttccgtcggtataaatgtccgggtcgaacagataagcggatccatcggcgtgcccgaatttaacagacccatcagcttcttgagatcnnnnatcnnnnncttct

SEQ ID NO: 13874 - DNA, 617 bp, Gossypium hirsutum
tttcttgcttccaggcatataaagaaaggaaaaggttgattttgggagcaaagattgaatgggaaaacaagaatacaagtaaagaaagataaagatttgaggaagtggcagaggcagagggtgggttatagtaaacaatagaggtgaagtcaacgaggtagtcaatgctttgatcttatcttatggttgtagagctctgcctgcctcacatttgcttttgaggttgggttgatttgatatttatgactaaatatttcctgttaataatattaatattacaatttttaaaaaagttgcaaaattgcaaaataagttcctaccttttttacaatgtttacatatggatccttagtgtgctctaaatttaatttgatctatgattttctcttcatcgaaagggattctattgatgtttattaataatgagatgtcctttctaaatttatttttatctttttataaaaataaataaatcttttgacattttcgtggatactaaaaaatatcgaaagttgtttactttaaaatttgaattcactcaaaaataaataaaatcatttttgttatgtataaatatttcacttttaattttgactcaactcatcatgacctcctct

SEQ ID NO: 13875 - DNA, 525 bp, Gossypium hirsutum
ttttaaccttggaatggtaattggcaaactaaatggttcgggtgggagtattgggccgggccttttcttagttggtataacccaatacgcaaagttggagtgtttggaagggatgaatgacttttggtttcggctttagtatttgcgtcaatagtttcggagagtttgcgtcaataatttcggctctctgcctctccatttccacatttcgctttcaaatacaaatagcttctcccttaaataataataagttgtcagtacctatattttgataaaattagatatttattttttaaatttattttttaaatttattaatttaacatatttttgttatcaattatatattatatcatattaaatcaatctaatcaacatgtaaaaattgataactttggataaaaaaatgtaaaaatattaataactagattatattttttaaattcaaaaataaaaaagtcttaagatttgaagcataaaaactaaatctaaattttaacaaaaggacaaggattcttacctaaa

SEQ ID NO: 13876 - DNA, 504 bp, Gossypium hirsutum
  misc_feature (474)..(474): n is a, c, g, or t
gaatgcacactatcttgaattgaaatgcttcaactgttatcactattgataagtaattgaaatttaaaagggcaactagattgtttaatagaagagatgaaaggtttaagccaaatgagcctacagatccatccaaagatagaagtatgcctaatacatttcgtggttttacttgtaataaatcttctcaaagtttcaccagaaaacttaaacacatatcttactacaagctccaaggaaagggccattgtgctataaaatgcccccattaatgtctttagtgagatccaaaaaagtggagaatgagatttttgagtaagatagaaaacaagatctagataaagactcccctttagaacaaatgatgatggaggtgatgaaactattgatgaataagaataacaaactcttgttgctgcaacaacttattgtccgagagcaaagagataaaatcttctatagaagtgcttgctnaatggacgatcaagcgagagttgcatgcac

SEQ ID NO: 13877 - DNA, 665 bp, Gossypium hirsutum
  misc_feature (30)..(31): n is a, c, g, or t
cacccgaagattcaaaccgaaataaccttnngctccgaagattgattataacttagttctctacatgatgcaatatttgagcaactagtctttacattttgacccacctagatagacctgtgactgaatcacagtccttccgattttgaaccctggaaccactgtgaaccccactttcaccttagtttccccgggcaagttatctctcttgctgacatcctccatgtataccatcgaaaaatcgagtcctctttcaacttgaaatatatccaccacgggttcaaatgaaaaggccagcttatgaagtgtccatatggaactagccatgcaaacaaatgactcatagaattcgctcaatgaccgccacgaattcagcacggcttcatttctatccaaattgctgaaaatcgatgactccatggtgggatgaataaggtcttgatacttcttctcacaaaaccttgagaattcacagctttggttcctacttagtaactccatggggttgctcaatatgtgttcgagcaattgcttcaatgaacaagtacccttattcccattacatagaacttcgttttttatcaaactgaaaccttcagaatcgaaacctcgaaacatccccaaacaaacatatgatagaaaagcaaatctagtgtgccctttct

SEQ ID NO: 13878 - DNA, 656 bp, Gossypium hirsutum
agctattaaagccacgttagcctccaaactgagaaaaaagcaagctttttttgaaattctattatattatgaattatcaacttgttaaagttctaacaattatttggaacaaatctacgaaggaaagagaggaagaaaaatctcaattggtccatcggttaaacatatttatcaagttaaatggattatataaacaattttatattaatttgaaaatatttttatcaagttaaaaaatacttcaaaaaataattttaaatatatataagattattttgtattttaatgtttataaaaatctttaaataaaatcatttaaattattgcataacataacctccaacaaatttgttttaaaatctactaatcattttaaaagtaaatttttatatcttcaataaatatatactttcacttgttgtttttcttatatggataatatcaaaacttttaattttgattcaatgtatgatatatatatgaaatttaattttatgcaaaaacttttttttgttgagaaaacaagtggctaaccgcttagatatgataggctcttgatcttattattccaattcatcgattaatcttacgagtacggagaaatcctaatattttccattataaacccttgtcttagcgtccaagcaataaagaaa

SEQ ID NO: 13879 - DNA, 689 bp, Gossypium hirsutum
ggacctgaactacattcaaacctgtttatacatgcaattaaaaatacaatatgcagaaatatgaacatacacagatgcataagagatacaatgaaataaaaatgtcaaaaatatatagataaaattactgtaaatttttttattataccaagggttcatatggatcccttcgtacaagagatggggtgaaattcaaagctttttgacccccaatttcgccacaggggcattgtcacctcattacaatcgtaactaactcaatgccatcattgttttcaactccccggaaccaatcacatccaaatagaccctaagtcattgattatcttcatgatcgctgcattttggaaggttcaccgtccaccctattgtatattattttacttaaatcttggtattctgccacgttatcagaatctaaaacagttcatccccacctcaatatactgtatttataattatttaagccttcaagttttgcagcattttcaaggactatggtcctatgatactcggactcgggtgtgagtatcagatacgggtatgcatctaataatggtatggttagatttttctacgtctttccatgtattggaggatctttggagaatatatcctcatatccatgtgtcagacacaattacttaaataaaaatgaagagtccaagcaacataactctggtccacaa

SEQ ID NO: 13880 - DNA, 556 bp, Gossypium hirsutum
tgagtcaccattcgccgctggttcccaacagtttaaattcggtaagagacccatgcgattactttcggtcaggaaaattcaaaaccattgaaatgttcaactcacttaatgccctctctgaagatggaagcttattgacaaagcctccatggctccttttcgccatgtcagtgtcatttggcctatacttcttgatactctacatgccattccttactcaagtatttggtattttcccctcagcctaaacgaatggctccttatagcggttctcattctaatcgacttggttctcaaattcgtaggcagacataaatctggattgcgctattctgctccaactaaaacatcaaagcagaaaactgagtgattattctgaattgtaactaacatttacatacaattttcatagactttcacttgctcttcttctcacttcatttatccataaattctagactagggcaaaatcgaaagtatattttcctgctcttttctttccctaattccattccattggaaggtacattctggaaataaacaaacatgcggttcc

SEQ ID NO: 13881 - DNA, 661 bp, Gossypium hirsutum
aattcctaatagccttgtgacttgatattaaatgatttcgtataattatattcaaatgtatctcgtactaatttgtgtataaactcacatgttatggatcatggttgataggaaacattgactattaatcttgttattaaaattttatgttatttcaataagctttattgtttttaactgttgaatttactaatctctataaaagcttactcgtattatttatcttttttccttatagatagcatttcatggaaatcgggcgatcggatcaactcaaagaaatcacactatccaaaaatcttttggtagtttttgaatgttcacttttggttatatggcatgtaataggtgatttgtaaatagattggttgcttgttacttgtgtagtttgttaaactcgaatgatgtttgtctttggataaattttaatatatgtgaataggtttttaatgtttggtttgtaaaggttcataagtatgtgattttggtcatatagctctatgctactagtgaaggactatctatagtgaaatggatttgaatgttgtagatgaatggtaaatttgacatgtgataaaacgtgatcatgtaaaccttgaaatgtaacttgtttggatatttgaattgtggtgccaatgatggcacattggttaggcacata

SEQ ID NO: 13882 - DNA, 574 bp, Gossypium hirsutum
  misc_feature (548)..(550): n is a, c, g, or t
  misc_feature (557)..(559): n is a, c, g, or t
  misc_feature (561)..(564): n is a, c, g, or t
gaagataagtgactcactcctctgagatggattccataatgatgatgctgtcgatagtgtctggagcattgatctgaggaaaaaaggcaaaccaaagaaatgggggaaaatgtcaatgaatgggaaaaacatgaatattttctgcatgaagaaaatcaaagatgcaaaaagaaagacgcctaaaatcaataatttatcaatgttattatgaaaatcatttcagaacccattctctctttcagaaataaaaacagggctggccaatgtaatgggaatcgatagcttttgcaccattcagctccatcaaaatttaacccttccattaacaggaagccagtggaaaagaaaacaatcattgaccttttcaatttatttatgattttaccctcaaaaatcttttattttcttccattttccatctcttggactgaaaagaaaaaaaatccttcttttccttctcttttccctccactccattatcatccctccaaacattatttatttactctacttacctatccctaacaattgcagtaactaatgcaatnnngagggtnnngnnnntagtgatagt

SEQ ID NO: 13883 - DNA, 469 bp, Gossypium hirsutum
gtgtatatatgatttatcccaaatcatagtgcctttaaactaacaagtatcataaactaatccaaaagatctctaagttaataccatgttgttttgtcactctcttagttctatatatcttttagcaggatcctttttaaataactttttctggcatgcttattgctaaaagaggtactgaaattaagcctaatattaaatttttagaaactcattttgtcccacatagtgaatttcttagctcattaaatatatcctttaccacgctcgtttttgttttcaatcactttttgcggaaagcttattgctctaaacatgtaaagaaattaactatactctagcatccaattttaaaaacaccaaccacaattgatcctaaccatggcgaccaaaagtgagcagtaccatggcgaaaaggaaagccattttcttctaaattgaccaaccaaaagtgagcagtaccatggcg

SEQ ID NO: 13884 - DNA, 659 bp, Gossypium hirsutum
tgcttcttttccttgacagagaaggaaccccatacacttttgcgcaataaatttgaacaaaaacatccaatgcaaatgttatctaaagatggtatcctacaacaaaatgataaacccaagtaagccaaagaattacgagttcaatgcctggtaaagcctagtaatacctggaccaaatgccatgcaaaaatatagcctaatgacgggtaaggtcagaaatctttcctacactgttcctcactcaacctcaattcatcatatattccatttgttagaaatattaactggatcaaagtataccttagccattcatttttccaaaagaattcaaaattcatcaatagcttgtgtgcacaatttccaaccatagcagttagtagaaacgtaagcattaggtgaaactgcataatcagcaataaaatacctttctccgatgacgatccatgtagcttatatattctaaaggaacccgagcaccccgagaaagcttagatagaacagagactagatcctcaagttttgatatctcctcaccagcaaacttcttaatgatggcatgtcgaggaacagcagctctaaatagcatataactgcaaaatacggaaatctagcaatcaaccaaccaatgaaagcccacagcaataaagaagcaaccacgt

SEQ ID NO: 13885 - DNA, 637 bp, Gossypium hirsutum
gtgtacctgcagagcacgagaaaaaaaaatgcgacacgattctaagaagaaaaaggaaacagagtacgaggaaagaggagggggttcaggttaagaaataaggaactcgggttttgtaatggatgtgaattttgaaatgaatgttattttatgcatactaaaaataggtaagatgaaaaagaaaggggctaagcgatattaacagggagaaactgggaatgcagtaatgcactgctttgagggggaaaaagagagggttcagtttaaatcaatttcatcaaaaatggtaagtcatatggctcttctttagcaaaattcaagcaatggaactacgtttgttataccccatacttggacatgtgacagtacaaaaagttacacgagaaatatacttcagccgttacaatttgagaggtcactagaaacttcatttcctcactcaatcacttaatcaggccagatgtagctactcaaataagtttcccataattaagctatcactcattttttttaaatatttgacttttcgttaaaaatgtgattttttttattatcaattttcgcatgtgtttcactaaaagaataaaacaacacctttcatcataaataccatcgtctcatcgaagacaaaaaaaaa

SEQ ID NO: 13886 - DNA, 627 bp, Gossypium hirsutum
tgcccttgcattctgtaatttgttcagaataatttaatatattcttgttgattttcaatgattcacttgttctgatgataatgtacggcaaattgtttgatattcctgaagttgttcaaggagtgtatttttggtttgttcttgaaaattcttgtattagatggctattatgagctcattgtcaattactttgattaatcaagaaaattgaaatttgtgtttacttgcatgctacataacagtttgggctggtaagtcatctgattctttttcttagtaattactgtttataaaggcgtttttggtatgtaattaaatgattaccagattgctcagttcattaggattgtttagaaggtatatacttggttgctataagttttccttggactagaattttaggtaatgcgaagcattgctaacaaataggtttatgtgttgtagatacaattgataatgcacatttaaaagaagaacaattgaaacaagatcaaactaattcaaccatatccttaattgaacattgcaacaagattatgcatggactgtattgtcaaacattgatatttttgtgtgaatcttgattcaaagcttttatgtacttatttgggttgcagatagagttcg

SEQ ID NO: 13887 - DNA, 485 bp, Gossypium hirsutum
ttggtagctaccatgactaagaggagaacgaagttcaaacccatggtgaaacccattgaatttctggtcctccctctacggctacgctacttttttcccttctgagatgcttcgattcttgggtttttgttattctcgatcttggtgattcataacttcacaggtttttgtctgattcttacttaatttttttggtgttataattttggaggttttaactcgttttcaacttcaatcctcacttctcagtctcactgtctctcacatgtttttatttaataatttgattaattttaaaattagattaatatactattctgtacctatatttaaggaattttagtgtttaatctatatttaatttttttcttaaattcgccgatggagtcttaattcgattgctgtgaatattgttgccaatataagaaaacataagttcgaatatgctgaaatgtataatatcttatttatgggttgggagagag

SEQ ID NO: 13888 - DNA, 631 bp, Gossypium hirsutum
  misc_feature (609)..(611): n is a, c, g, or t
  misc_feature (614)..(615): n is a, c, g, or t
agaagcagcttagtggaataaaaacatagccggtacaacttagctaacattacaatgaataatttcaaccttttgtgtcaagaaggcaacttgcaaaatataccttcataaattttgaccccccgaaaaactcttcttgtttaagacgcgatgtcttgacaaaacgagacacatatgttgcctttccatctttgatgcgcagaccatgaatcattctataaattccacaatcaacaaacaggttacattatgttaattctgttatatcatgcaagtgcaaccacatcaagtaaaaggtaagaagcaaagaacaagatctgaattggcactatgacaagcatccacatagttggagcaatacataaagcagttaatcagagaaccagtgggcaactaaagcaaagaagtagtgctatataaatggttaaattgaagcaaacatacccatctccatcaaacctggaaggcaaagaaattacaaagaaaaaaaagaacaaagaattaaaagtgatgaccatgaaagttaattccccagaaaaaaaaacagaagagttgaaaataaacataccactgatatgctgcaacaggaggaaaattggggttaggccnnnccnntacaaattctccattc

SEQ ID NO: 13889 - DNA, 667 bp, Gossypium hirsutum
agcaagctcatcacctatttgaactcatcttctccaatcccttggtggaaaggagaggtcggaactcctcgagaagttagttttcgaagacggaagctgccaggaacatctggtgaggctcggaacacaaattgcagccaagtgtgatgagctcccacttgccattgtctctttggctggttagatatacttaccaaccccagtcggtaacttaaccaaacaaatggttaaccatgtttaggtatattagctttgaagaatgatagcatatccatcaccttaaggaatgctttctctatttgggtgcttaccctagtgattgtgaaatccctgcaagataaatcatcaacctttgggtagcagaggtacttgcaaagggaaacaatgtagcaagtgccgagcaatttgcggagagatacttggatgaactgattgatctatgcttgatcgaggtaaccagaaaaagatcagacagggtgttaaaacattccaaatccataaactttggcgcaacttctggcattacgaaaagcgaacgcacaaggttccttgatgttcaaatgaaggtaggataaaaatccacgagctgagatacattttgtctgatccgaattatttatcccacctacactcgttgctatgtttccacaataacggtagccttgat

SEQ ID NO: 13890 - DNA, 567 bp, Gossypium hirsutum
  misc_feature (58)..(61): n is a, c, g, or t
aaaattaaatatatcaaatttaaatcttgttatagtataactaatttcatattagagnnnntaaaatttaaaacagtatatatttgaaaaaattttcataacaaaataataaaaaaaataagatagtttagtatgataaacttaaaccattaattaacttatttaggtcccaaaattattattttataaaaattttaaatttttaactttctttatatatttttagattttttttgaattttttataattttttgaaaatataaaatttggaatttttataaatattttgaattttaaaaattaatttgaatttttgaaaaatattttttttttgtatttttttgttgagaatgagatcatgaatttgctcatttccaaaattgggagaaaccaaaatagtatttacattaatttgttatttgaactattcgagttatttaaagggaaaaatttaacttgactcgaactcaaataattcaactaaattaactcgaaattcaaaaaaaaaaatttttttgaatccattaaagttttgggcccccctattaatccccccgggaattggg

SEQ ID NO: 13891 - DNA, 651 bp, Gossypium hirsutum
tgaagaacaagttgttaaggctacccggccgcagggaaggttggtacattagttctatgtttatttagtggtctggtaggagattattgccaattatttaattagtgcttgatgttatttgttcttattttactttttccggttcttagatataagaaaagagaaagagggaagcttgtacatgcatattcttcgaaggatcttgaaggaattcttgtaagttctaaaccttcattttcttatctactccgttttcttcagtgttatttaaattgttaaggtttttacttgcttgaagctgtggcaattatgttctttttgtacattgttgtctagtgttcctttcaagatgcaaaattattctatgattacacgagatcaaaatgtatcatgtcaagtatttggtttgaaatgtattcatttgtcaatgatttttcaaatttgatttgttaataccatccaccgtaatcataacaagattttcgtggttagaaatataaatgagctcaaggataagttaaatctagaatagttgtctttctggctgtgatttgtgaagataattgtttaatacttgattgatttggtcttcgtttcatattagcacgagaggcagataccatgttactttcaccatggagtcacttgact

SEQ ID NO: 13892 - DNA, 633 bp, Gossypium hirsutum
ttttattttagttacatcattcttttacgacatttttggctttatttctttttccacacatttttagctacgtccaaacccattttataatttaataagatttataaatttcaataaacatttttttattgcttaacgtgtatatgacctttcataaaaagacatgtatataacataatttattttgtttttaagtcgcccaaacattaatggtataatgagtttttttaccttttttactttataaattattaatcaaatcacctcaaatggatagaatgtcaactttgttgaccatgttagcaattaattaattttttaaaatttaaaaattaattaattactgatgtaacattcacgtgtatgtcatgtcatcaaagctaaaagacattaactttttcatctattataagatgatttgataagcaatgcaaatttaagggctaaaaaaagataaattaaatagagagctaaaataactttttcatggaaattttgaaataatattattttacacaaatcttaaattatccataatcttgcattttctgaagggtggatatgattaggcgcatcctcaaactgttaaagagtatacaagtaacttagctgagctgcataagctaaacagct

SEQ ID NO: 13893 - DNA, 598 bp, Gossypium hirsutum
aagagactgataatgtgcatcatgcaactccttcctcaaggaagaaagagttgaataagagtcgcctttaccaaaatctaatttgtggttactgtaatcattggtcaaggaacacaactcatgaacctcaaagcatcacaaggtctcagaaacataaaagggagtttttcagagagattatttactaagagaaagaggatgtcatgagaaacgattcaagcacaatgacataatctagaacaggtagttgaaataaaaggggggaaaaaaagaaaggaataattaaaatctccaactcaaatgaaataaaaggatatcctgaaaatattcccatgttgtgctgttatgtggtcaaccatgttcatccctactctctgagcacaaacgggacatacctgcaattacaagcaatattgattaactgattttaaactccttttatgtcaaaagtgtaattaaaactaagctatcttgaagtgccctgattattctgagattcaataagaacacttccgtctggtaagaccagcatcaactataatatatggacacatattaatgaaagttctgtaagctataatataccctgactatgtac

SEQ ID NO: 13894 - DNA, 613 bp, Gossypium hirsutum
tgtgatctacctgtacaaagtaagatactggctagactatttcttggtcatgcctttttgacttttgagcctttcggatggcaccttgcttcacttaatccctttcaacctgcactgcaggcaaggggtaaaggcctatagccctacaattagtcaagttgataacttttgtggatcctgatgcaccttatcactatcacttgggagggtagaatgccgatttagcttttgtaaagcatatgaaaaaaggtgttagctttatttttctaccaactttagtgcccctcaaaataaagaaaaaaaaagtactgaaattttacaaatgagtgatggccattcgtttgcttagccattggtttcatttcatatcagaaagtaattccaaaatgatttaagaaagcattttgagaatgcataaatctctcatctcaagctttcaacgagtatgaagaaaaaagattaaaagatgtatttagttgagttcttggactgcttcaaagggtatgagttggattagtgagctggttttagtttgtgaaacaagcatcatacaatgaccacaacttggcttttggtttagggtagtcgggagtgattattgatgaggcaaacg

SEQ ID NO: 13895 - DNA, 691 bp, Gossypium hirsutum
caaagaccgaaaggcatacagtaaaaaggaaaagtaccaaaggggaaactgaaagttgttttctcttgatcctctagaacaatagaaattttattgtatctagaatagccatctaagaagcagtaataggctcttccagtaagtctgtccaacatttggtcaatgcaaggaagtgggaagtggtcattccttgtggcaacattaagcttgtgataatccatatagaatcgccatcccataggaatacgtgtaggaattaattcgtgtttttcattactaaccattgtgatgccactctttttaggaacgtattacactggacttgcccaattgctatcagaaatagggtagataattccagcatcaagccactttataatgtccttcttaaaaacttctttcatcttcttgtttaatcttctttgttgctcaatcgatttcttgccttcatcttccaacttgatcttgtgcatacaaaaagatggactaatgcctctgatatcaaaaatacttcaagcaatagctcatttatgttgctgaagaaaatggatgaatttctcttcttgagttacatccagtgttgcagagacaataactgggagagtattattatcatcaagaaagacgtatttaatatgagtaggtagcggtttcaattctacagtaggagctttgttgataggtggtttga

SEQ ID NO: 13896 - DNA, 688 bp, Gossypium hirsutum
tagtccggtattgccgattgaccaagcagcatccgtgaaaaaattatttttctttaaaaaacttgttgtttggtggctggggagaggggtgctgccaattggtcaaacggcactaattttttactttacctcctgtctagattggtaaacattacttcctttatcccatttcaatatttatttaattattttatgttatttaagtaaaaaaacccatctttaatactatttgtagtttttagttctattggcctgatattaattcacaatttaataaggatttttttaatttttaaaaaatcatatctttttaaatatgccaaaatataaataactaggtaggtggagtaataaacaaactccaatgttcctttctaaaaaaataatttaattcaaatcattattgaattaaaatagaatttaaatttggtccttaattatttcctaccttttttgtattaaaaaattgagttatacaaaagctccacgttactcaccatcacatacctaaatataacaaaaatattatatctatcaaagttttttttaacattaatttcattatacgttcttatcatatttgttctttttgatacaatgcctaaaactatccatagcctttctccaatctttaaatgggaataaaatgtgcttcagcgcactcgaatccacgtcctcctgtactgat

SEQ ID NO: 13897 - DNA, 649 bp, Gossypium hirsutum
tcctactctagcgtgtctttttttttggcctgtggatacccaaagctaaaaaagaatgacaggaaaacggtgaaaagagaccgagagtgagagagaatcttcgaagaaatggggggcaatggactggatagatatatttgaggatttaaatttcgaatgatgggaaggaagctggcccgatcagaggtaagacactggaaagtgtgtggaggaagcggcagcgctatgttagaaaggagaataaaggaggaagagagaaaaagaagaaaaatagtaaaaaaaaggggaaaagtggagagaatcaagggagaaccgaacgtgagagagatgaatgaagaaagagtttttatattatttattttgaaaacggtttgaattttattttattttttgaaaaaatatcggactggatattaaaataactaaataaatagtatatacacaaaactgaataaaacccaaactaagagaacaaaataataataaaagggctcatctaactaactaaatgaaggcccaaaatcagcccagtacattgggtacaacctaaactcaataacccagtaaccaaaactttaagcggtccacagccacaaacactaaaacgaaagcccaaaaacaccagcccaactacaaacctaagccttca

SEQ ID NO: 13898 - DNA, 674 bp, Gossypium hirsutum
cttgtttgttatggttttatggatgtcattgaataaagctgtagaagaaagagacattgcaactacttttgctattttggataaggaagttgttaatgtttgctttgcaataaaaaggttttactttttcagaaaatttaaggcttttgattaggatgcaaattcaaggattctgctttcacccagtaggatttgttttatagtcaaaatcaaatggtaagcaatttttgattaaaatggtgcttcaaatgtggattctggacatggattgttctttacatgcataagaaatgatttgatcctttgctatggccattgttttctcttgatctagcatgttattcatggtttttgttttatcatgcaaccaacttattgagcagagttgattttttccagtggcattcccttggttttaattaaaaccgaaaagcaattgatgtttgtagtatatggagtctggtagagccatttgatatttcttttaaacatacaatacgtgtttttttcattgtccagtgcaagtgctttcggggtttctgccaagtcgatgcagtgttcttatgatgcaagagggaacagcgtgcccacgattcttcttatgatgcagaagcgtttgtacgccgaaggaggcctcaaggtaagtctcaaatctatgctgggtttaatgcctg

SEQ ID NO: 13899 - DNA, 637 bp, Gossypium hirsutum
aacccggttagttgaagtgttgtgattttgcttacttcttttgatacctacacgctacagccatacattctttgacttcccaagggttgggtgccacagtgaccaacaaaaacttcaacataatttaactaattctatgtgaataaaatgatgatacatgaatttaatcttaaaatttttaatgatatgtcgtcgtcatcatctgacttgagattgcatgtaattaattactaatgatgtgttactttcagaaccaaagctttcatggaagaacaaggacacgaacccaacgtatatagtttttcagtcaacgcttggtaatggtagtttcaactccctacctcatgcccttattgcttaaacccagagtctcttccacgattctccacattacttgaaaacgaagaaactgagtgtgaagtcaactaaacatagtctgttcctctttccatctcttcgtaactgcagaacataagtttctatctaccgttcctagccatctccttgttgtttgggtcatattccaacaaaaaaacgcaacacctcaactttcaactttcatcctaccctttttctttttcatttgattctctttccgtttatttattgtaaacaagacctgcccagttaatgtaaa

SEQ ID NO: 13900 - DNA, 659 bp, Gossypium hirsutum
ttgatgagttctataattgttattatataatgtgtcaagattgtggtttctagaactagaatgattatatttaatttttttatatataaaattaaattgtagatgtcaaaacgtcgcctacataaaagtacgagggcctagtaagtagagctagacatggagggactaaattacgtagagtcgccactatccaattaggctaggttggttagccacctatcgtctaaaaatctagaattagtactacggaaaaatcctaaaaatacagactcgatctcatcaccaaatttcaggttcgagagtacagttacgtatggggaaggttatagcaccccctacaatgcctatttagggatagtctgtaatagcccatttttagtcaaatcaaaacagtggttttgaggccacaaattcaaagtcaaaataattattttattattattttaatgcttacagtatgatagaatgattgtgtgaaagtttcgtttagaaattttatcgtttaagtgtttaatttgataaaaaaggagtaaatcgcgtaaagtgtaaaacttgtgttctattagcaaaaggtgtctcatagctatagaaccttaaagtgaaggtccttatgtggttaatagcccagtatttagatactggatgataatagcttggca

SEQ ID NO: 13901 - DNA, 663 bp, Gossypium hirsutum
gggaatgaagcaagaagatatgaacatgactgagaagttcggcgtatctatgaagagggaaaatgatcttgtcctagttccgagtccttaccatgcttccattacaattgcctagaggcacacctttatgctgcatacttctatgagcttgtaatatggtgtcgtgcttgtaactctttttatgttcacattgtgtcgtgtgtatatatttgtctctaagagctggatgtgatttgggactttattttctgcatcgttgaacaatttgatgatttcaatgttattgatttcaatttcacactattcttatttccagtacttgtatgttaataggtttgtgtttcctataatgtggttaagtcgcggaatttaataaaaaatttattataaaattgctaaattaaaggctcactaacctataaagttgataaaaagaaaataagtagagattacataatctaattcaatcccctaaatagggccacttcaaaaattcgcaatccatggcttcccctatatgccagtttaatcagactatcggtctcttgattgtcctctctaaaaatatgtgaaatatttcaatgttcaaactatgatagcaactggagaatcctccttatcaatgctgagttagatcctcccataggtcttgtctagatagcc

SEQ ID NO: 13902 - DNA, 480 bp, Gossypium hirsutum
  misc_feature (473)..(475): n is a, c, g, or t
tattattattattattttattttgatgttaaatagtttaatataaaaaaaaccaatcagttcaattttctttatgtatttatagttttttttctttgatgcattaattggttgagaattatattttaaatattttttattttttttggaagatcaattattttttgggtaactaatttttacaagttttttttaatgatttttcatgtgtttttttaatgcaatttttcgaaagagaacagcaagaccatctgttaaaatagactactaagaccgtcaagcgacaacaaagaaaaaatacccgcaccaaaacagtttatcccaacaaaaaatcaacaaaccagaagatgctcgaagtaacattatctcgactcaaattatccaaccattaacaataagtcgttacctaatataaaattaaaaataaatataatattaataaaaatttaaatacttaaaataaaatgttcacannnatata

SEQ ID NO: 13903 - DNA, 751 bp, Gossypium hirsutum
  misc_feature (627)..(632): n is a, c, g, or t
  misc_feature (638)..(643): n is a, c, g, or t
  misc_feature (648)..(655): n is a, c, g, or t
  misc_feature (660)..(660): n is a, c, g, or t
  misc_feature (662)..(664): n is a, c, g, or t
  misc_feature (672)..(673): n is a, c, g, or t
  misc_feature (678)..(678): n is a, c, g, or t
  misc_feature (680)..(684): n is a, c, g, or t
  misc_feature (688)..(697): n is a, c, g, or t
  misc_feature (706)..(707): n is a, c, g, or t
  misc_feature (711)..(714): n is a, c, g, or t
  misc_feature (716)..(716): n is a, c, g, or t
  misc_feature (721)..(728): n is a, c, g, or t
  misc_feature (730)..(734): n is a, c, g, or t
  misc_feature (736)..(741): n is a, c, g, or t
  misc_feature (745)..(746): n is a, c, g, or t
atttgtaatggagacatgtgtttcttcatccatgtttaggttcattgtaatctccatgatttctacgtaattacgtcttctgtatcgtgggattattcattgagggactctcaaatgcttgattaaaagatttcaaatgaactaaaaaaaaatgatagattacatctacaggatgggttcaacagcggcagccgacggttgcgtcgaaaattggaaataacaatggattctaaaaaataggatgaagatgatgaaattcgctacagcaaaaaaggagtagaaaaagaatggctcaggaaaaaatatttatatgaaaattgaaaatgatttttaaattttaacatcaaattttttaaataaattgttaatgaatatatttaaatagattattaaaattaaattatttcttataattatttattttaaaatatttactatattgatatacaccactaacatttaaatagattaatcatagttgtttttttataatggtacattacattttcagagggatacgttaattcaaattttagagtcgacattattgggaggaacagtcacgaacttcaaatatgaatcgtaaaatttacttagttttaatttaaggtggccagtagcctcaannnnnnccccannnnnncaaannnnnnnnaaaanannnaaaaatannacaanannnnncccnnnnnnnnnnaaaaccaanncaannnnanccccnnnnnnnncnnnnnannnnnnaatnnaccca

SEQ ID NO: 13904 - DNA, 625 bp, Gossypium hirsutum
  misc_feature (33)..(34): n is a, c, g, or t
  misc_feature (554)..(554): n is a, c, g, or t
  misc_feature (558)..(561): n is a, c, g, or t
  misc_feature (563)..(589): n is a, c, g, or t
  misc_feature (592)..(592): n is a, c, g, or t
  misc_feature (594)..(597): n is a, c, g, or t
  misc_feature (600)..(600): n is a, c, g, or t
  misc_feature (602)..(602): n is a, c, g, or t
  misc_feature (605)..(622): n is a, c, g, or t
ggttacttgttttaaccattcgttgcatgggcnnattggctaagaaaagcattttcatttttattcacaataaccatctcatattagataacatcatatctaaatctaccagccagggtaccttactgtcttgtcaaaattacttttagatgcgcatcagttatctttgttgaaagcatgatgatgaggctgatcccctatttatgacaatactggcttatggttcttaaggatgattttactagtcttattaaaaccatttacaaattgctcatttgcaagacacagcaaaaaagggttccgggattacatcttgaactctttatgcataattgaacacttgaactgcatctttaagttttctggaatttgtcattgccgaagttatctatgctattgagatattgaagtacatccttaagattagagaagaaaagtctggaatggaaaatcccaatgttgatgatgaaaagataaggctcgctgcgatacggaacagaaaaagaaaatcacttgagaatcttcttaacgccaactcctatagaaaccaagangggnnnngnnnnnnnnnnnnnnnnnnnnnnnnnnnggngnnnnggngntgnnnnnnnnnnnnnnnnnnttt

SEQ ID NO: 13905 - DNA, 650 bp, Gossypium hirsutum
  misc_feature (64)..(64): n is a, c, g, or t
acttacacaacccgttataatgctgacagcattactatgtataccagcaaataaaaattggttnctttccttcagtatttccatacaacaatcccaaatagggttccccagtccatatcttcaaagtctattctccatgtgttagaaagattgttgaacaaccactgcactaacgaactagataaaaactcattaatcatcaaccttcgaggaagaatttgggaccagatcgtgcgagctaaaggacaatctggcaaaacgtgcaaagcgtctcctaacacgtgtccgcaacagccacaggaggggtcattagagaaccctctacgacatccctcgctgttcgtcaaaatgcggccattcaaaactaaccaaaaaaataaacggattcgttggaagcccttatatttccacgccaaagaccaaaccttactacttttttcccaagaaccttcaaccagttagaacaggctgatcggaccgtgcgcatgccgtccgtattccatttctagaccaaacgatcaggaaccgcatcaggggtgggtggtggaatggctgcaacaagctccaggtcttccttgcacaaaatccgtttccaacaatcccagttccaatcccctgaagcagtcacaagctccttgagagtcaaatca

SEQ ID NO: 13906 - DNA, 646 bp, Gossypium hirsutum
  misc_feature (57)..(58): n is a, c, g, or t
aatacatgtcaacagtttacttagcaaaaaatgaatatcatttagaatcaccttgtnnatactgaacaggaagtcccttaaacatgaaaatttgtaaagaaagactaaacttgactatggctactacatcaaccaatgcatccgccactctacttctcaacttatgttttagttccatctaaagaagacagaatccatctcttcttcttgtgcctcttgctactaatatcagcaactcaaaccttgcatttaaaagatttaatttgataattataattctttgtaaaatattaaaaaaaaaaaaaaaaaaatggtttttgtaacaaaaaatggattggaaacccaatccccttaaaaaaaaaggatttgtgggaaaaataattttgttaaaaaactttgccccaccccctggaaacccccctttcccttctttttttaaattcccttcccatggcccctttctttccctttttaaaaaaataacccttttttttttatcttttaaaaacggctgggcccgttttacccccggtttgcccaaaaaaaggtggccaaacccccatttataaaccctttttttaagggaactttcgtttctttttaaaaaaaaattggtttttttttcccccaaaccccccttcaataa

SEQ ID NO: 13907 - DNA, 628 bp, Gossypium hirsutum
ctaaagctccaggtgcgatggcctttcaggaagcttcttcaaagagcattgggcaatagttggaaaagatatcttaaatttgtgccatgaggtgatcaaaggaaaaaaaagatcctattgatatgtctaatttccgccccataagtctgtcgaggatcgtttataaaataatctcgaaagctttggcaaatcggctgaaagatgtgctaccccattgcatcagaattaaagcgcgttcgcgctgggagaatgatccatgacaacatcattatcgtgtataaattaatgcattacttttaaagttcaaaaaatggcctgaataaaaattttgtggttaaactcaatatgagtaaagcttatgacctcgtggaatagaattttctaaaggaagccatgaaaaaattagatttcaagcctagttagattgaaaaaattatgcggttagtggtttagtgtaattctatgctgtctgactatagctataggcggttccgacaggggacccctctctccttatctgttcttgatttgcatggaagcgttctcatgcatgcttacccatgcacataatgctaagatctttaagggcatctgagcaagtcaaaatggtctgagtattagggtggat

SEQ ID NO: 13908 - DNA, 452 bp, Gossypium hirsutum
tggtcaattcttgattcaattggtcgactaatcctatttattccgatttaattaactatgccacaaatatacatatttctaaaataatatgttagtataaaaatatttaatcaatttgagttatgaaattgtcgtctaacaaaagttttgggtatcttataaactcaaaattttcaaattatgctggtgtccatttgtgctttatttttggtacaagttctttttggagttataccatatattatataatttaaaatattcttaaaaaatagattgaagtaaattaagcctaaaatttaaatgtttaagtcaaagcttaattgatagtttaaatgagattattcttttttttaaaacccgtttttttttaattttatcaaaccgcccctaaaaaataaataaaagatggttgttagtcttttcctatatatgagcaacaatctttgcgcaaa

SEQ ID NO: 13909 - DNA, 601 bp, Gossypium hirsutum
gttctttgaatgattaatgtcttatattgcattctttatttttttttctatctcatgcttatattttaaaaaataattaatatgatgcttcttttattaaattaagtggtatatataagacgataacacaatatccattaacgatagtgattaaaaaagttgaactgatatgatcgattttataatcgacatggtgataagtaattttgtatttcaatcaaattattaatgtaaaatgtaaacttttagaatgtaattttttttatcaacatgagataatccatttaaagaaaaggataacgaataatctaaccaaagtaataggaattagacctaagatgattccaaatagaaaaacttcaatcatttcaatttatttgaaaggagaaaaagaaagataatatctatccctaaatattaatttctattgcccatgaatattaatacttaataattgataattaacatgataaggagctatataatatatggtataggacagaaagttttgtttttatgaattgtttgttcatcgaattaattttcaaataaatcgtattttactcagatcaataaataaagctgaggttatagttaaagc

SEQ ID NO: 13910 - DNA, 575 bp, Gossypium hirsutum
tccacatcaacaaagctaataaacgttaatttttctattcatttttagacgatttaataagcaatgcaaatttaaagactaaaagaaacaaaaaaaaattaaataaataggtaatgaattaaactctaaaaaaaaagtgttacaaaatcatatcagttagtaacgaaatccttaattaaataattaatagatttttttggggggtgatattgagttaatccctttctcaggtaattagcgaataacgtaacggaaacatagtagaagaaaaaactgggctggttgtttccaaattcataaaaaacattagattattttccataatttcttaattcctttacattagttttgctgtaattaccaaaaccatcgttttagcttaaacgggttaaattaaagtctcataatttataaatttcctttccttctataattccttttgacctatatttatctgtcagttcttggccccagtttttcatcaaaataataaaaatctttttgcagcaatggctaccctgaagcttttcttttcatttctcatggttacagttcatttgatttcatccatgggg

SEQ ID NO: 13911 - DNA, 658 bp, Gossypium hirsutum
gcttgaagacatttgccatagatactgatttaacattgttgctgaagaagaaggtatttttttggtgaaaagttttgtttattttcagccaaaaccacttaaatacatttggctgttaagcattttcgtggtaaagttccagttttttcttttttgaaactacacatcccccatgtatacacttaatgaagataatgcaaaaggactaatgattcatttcagtcattctcttcctttttctttcatttagaacgtatacatcatgctaggacccggcaagctcgaacaaaccagcttcaccttttatcatgttaatgcatttttagtgatgaatcaaacttacatattgaaaattaaaattgggatatttaggaattttgatcatcttagaactagtgagagaaacacgacagcacgtgtgtcccgccctgtcggtgtatgtacagcaacagtatcagagaaccaacggcttaaagggttggtgtagtggtgaaccgaagattaatcaaatcaaaggtttccacgttccattttgtcttacgctcattgtttatggtagggatagagtcaaaatctgcggaaggattaatataccatttagtacttaagttttacttttctttttttatcataacagaccaaacgattgaaagaatgc

SEQ ID NO: 13912 - DNA, 611 bp, Gossypium hirsutum
  misc_feature (62)..(67): n is a, c, g, or t
ttcttcgttcaacttgcatttttttcaaagtatcttcgttcaaacttaaaaacttgaaaaannnnnnaatttctacgaccccaaaaaagaccaattttcgatagtaaaaacaaacaacgaatctcaggtatttaccacgtgaaataatacgaatcttgtctgaaattatcagtaaattatgtacgagaagaaaaaaacaaagctgcccaattatgataagaacagaacgaaccttaggtctttgccctttggcaagtgcaccgtacagatcaggatttttgctggaaaaaattggaggcagaaaaaaaaaaaaaaaaaaaaaacaaaacaaacaaattaaggttaacctaattattatgcaaaataaaaaggcccacggaaatctgaagccggccaactttcaaattcaaccatatctttttcccttttcggcaattaaaaattcttttgcggttaccttttccaaatccatttgttttattatatttaaaaacaaaaatagaaataacatttctcttttttttttggaaaaaatttaaaaaccccttgttaaattggaaaaaaaactaggcccccgaattgaaagggaaaaaaaaaaaaaaaaagggggg

SEQ ID NO: 13913 - DNA, 612 bp, Gossypium hirsutum
gccattggagatgcgactcaaactacaagattctttggaaagacccttaaaatcttgtttgacagccattggataaagagattgatgttgacaaacacaattacaaatgtgacttgtttagagttttttttcttttcttttatttcattgtaaatgtatgtgctttcttggtgtattgtctatcatttgttaatgtccaaaatgtttgcataagaaaagtcactctataaagctttgatgtaatcttaattatgtgattaaaaggaatatattttctttctttgaaaatggaagtaattaatatattgtagatttgttgcatctagacctgttaataggtcgggtcacctgaaaagtagaaggatttgagtaaaaatataggcctaaaaaataaatgtaaataaaaataaggtctattttctaaacggactggacctcgggtaagttttttttaccctggcccgactcggcccggatttgcccaaaaaaactgttgttttgccactgttttgttatcatttctctattatattgctgccattttgttgttattatttggatattgtaaaactcttactttattgttaattttgctactattttaaagggatt

SEQ ID NO: 13914 - DNA, 614 bp, Gossypium hirsutum
gagcctttttggaaaagaaggtagcttgggtatcgtagatccctagagcgaggcttaggatgaatttgttcaggagtgaagggattctgggaagatttttcttgctcctgctaccctatgagaagagacaggtaccccacaaatgattcaagaagagaaagctattgagaagagtaataatgatgataatgttcctgattttggcaaggtagaggctgcaactaatgtagccgcataagacttggttttaatttgcttccaaattgtaatcttctttcttttttaatggatgaatacttatttccttcctctctcgcgctaactacttctttggactcttggtatctttgatatggcaagatccatggtagattgtctacttttgcttgcaaacgtactatatatgttgatataataactcataatatcactattgttgaagaaatgttgtaattgttgacttggaagtgcttgatctaacttgtcaattccaaataatcatatttgttaaatatttgtctttagtaccaatcttgatcaagtgatggatgttcgcatctccttgatagatgatcatgtgccatacacggcccaactcaacaacgggctctcat

SEQ ID NO: 13915 - DNA, 632 bp, Gossypium hirsutum
ctttggcagtgaaaacattgggaaagcaactatttacgaacactagagaatttgattggcaatttataagagagtgtgaaatatggaggctggagcaaagtaaagatgatattttaccagtgttgaagctcagttatgatcatttgtcatctcatttgcaacaatgttttactttattgtcattgtacaaaaagaacgagatttatcatagtcatgaagtcatccaactttggatggcaaatggactgcttgagcagccaaaggaagagcaagagtgggaggacgttggtgatcggtatttgaatgaattgctgtggaggtgccttattcagaaggagaaggattatggcaattattttaccttcaaaatgcacaacctgatccatgatcttgcattatatgtgtctcaaaaacagtgtataacagtgaaatgcgatccaaaagctgttgacaaaaatgttcggcatttatccttttgtggtagcaagctgctaagagttccagaagccttgaaggatttcaaaaatgttcgaaccgtactcgtccaagaagtttcagaggaatcaaagagaattcatgaatccattatagatctttgtgtctccaatttcaagtacctacgagcacttcgt

SEQ ID NO: 13916 - DNA, 639 bp, Gossypium hirsutum
agtcaggaaccgagtctaccaatgttcttacgaagaatagttgaggggggcaaagggaaaacgcgttggggggcggggaagatttttggtttgggtaattgatttgatttgatttactagtaatttgttcatactcttaagcataaattttaaattttagatggattttaatttaatttgtagttgtatataaaaattttaatttggtgtaattatacatattaaactttaattatggcttaaatatgtaacttgaaatattatttatatatgtaatatataaatataaaatgatgttatatcaataattgtgttaataatttatcagaattgaatcaaatcaaagtttcatatataaaagtacaccaaattaaaatttatgtatataattacacattaaactataattcataaatggttttgagattttttttgtagaaaaataaattgtggtttgaaaaaggcttttgtttgtgaggaaatcaatcatttgaatagtttaacaactaaaaattaggtaaatactagttgaaacgtgtaacttttatttttataagttttagggaatattttttattaaattcaataaagtaacataacgtgacgaaataaagaagaagacaaactaaactcaagcaa

SEQ ID NO: 13917 - DNA, 641 bp, Gossypium hirsutum
taaagcaatgaagaaaaaggaaataaattctgacaataaacatccatggaacgccattgctggttgttttgattattttgcaccttttcatcgtccaagaacaccactgctatcatttgagtagtattattgatgggtcaaacacactcaagcatattttcctgtcgcacaatgtgcagaagataacacttgcctaagtaacaccaatatatatatctaaactaagctatgatatacaaccctgacaataaactcagaagtcgtctgtttttcttggataaacatatctcagaagtctaattactctagacctacaggtaatcgactttctgttgtcctaatccaaaattacttgtatatgatttctggttctaggacaattcataacatataagcttcaatattcagcacaataaatttcaattcttacctctcatgcactctaatttctgatcagccaccttaactgcttggacaagatgggcaatgcgatatttgagtttttcattttccatggtcagcttcttagcctacaagtaacaagtcatcgtgctataaatcctattgttttccacaaaatattagacaaagtttcaactaccttttctcgctctgaaagtgtctcagcatttgcatcttct

SEQ ID NO: 13918 - DNA, 665 bp, Gossypium hirsutum
ctttgtaggccttacccaaactttaatgattttcaatgaatccgggattccttttcatttcaatttttatgcaattataatatcattttaattttagaaaatataatttaattaaatcacttaatatttattatgaattatttatattaaatttaacatgtttatactcgattaaaatattaactgataatgatgacaatgaatatatgagagaaaatctcaacaaatataaaatataaaatataaaatatttatttttctaattaagattattaacctattacacactatttaatttttttaaaaataagatatttgaactgatgctttgcacatcagggaaaaaaattaatcatgaagaaaaactatccaataaattattgagtcagagtgaaaccatacatcgatacaaacaaattaataactaaatgattacaagttccaaaatcaagtcaaaaaaatattaataattgaaatattgattcttaaaatatcatttctatattattgttgaacaagaattttccgaatctatatgattgtttatatcaatgttgcccatgtctttcttctatgctgacgaccatccaaaccatatctaataataaacctaaaaagaaaaaaacaaaacaagtcggcacctaatccatggctatttgaccctc

SEQ ID NO: 13919 - DNA, 673 bp, Gossypium hirsutum
cttgggttgagagagacagaaccttgattgaataagccatgggcagcaatatatcaggattcattgcatcctccgggaagttacgcaaagcatgaatgagtttctcaaaggataaatttatctgatgaacaatgtaacaatgtatcaatgcaagataaaatggtttgttggatctcgagaaaataaagaggtcttgaactaattaccaaatcatcatggcagtacttcaaaagggccaaaccaactttaaagacaatcttaacaccctgaaaaataaaataaattattttgtttgtctttttcttttactgcaaaccaatttccaggccatgtaattaattcaacagcttgaaccgatatcatatttccaaccactaacctcaaagagaaatacatcccaaattcgaagagccaaaggaaatgggaaagagtatgagaatacagttatgaaccactggctagcatacatgcttggatttatcatctcccggctaaaatgctcacccagctttggcaagtgctccctcactaagtgctcaaactgaaacaggtattgctgtacaagaggcagccccacctatcaagcgcatacaaattttcagagaaatgaaacaatatatatttgattgaatgcctcaagaaaaatgcatcaaacgccagggataatatattc

SEQ ID NO: 13920 - DNA, 698 bp, Gossypium hirsutum
atccacatccaaatccgctaaaattattttttatatataatcaaaattataagtggattgtgatatctaaatctacatccattagctaaataattaagcaacacaaatttgggtaatagatatctagactatctattagcatttgttttgaatatacagtgtatagtaattttaaaatcggaatatgagtctgtgtgaatatatttgtaatctaaattttcattcttattatgtatcaacaataatgtatttatatagaaattattcaattataatatcaagtaaataatttgaaaatgaagtacttattatttagatttattttattttagttaagttaaatccaagatgggcctgatcgaaaagtgtttcaaccattaattaatgagtacacacccatatatcatacatcatatataccatttatattttacctttattcaattgtatttgatgagatatgattttcgttgaaaacagcccacttgtaatcataatgtaaaaccaaattactattagaatttcattccaaattaattaaaataaacaacggaagaaagtctaaattaattattatttgtaacttatgttatagttaaataaatgaatatttattttttaaaactataattctaataataaatagtttatttattttttaacaatcttgtcatatttgttctctcgaactcaggtcc

SEQ ID NO: 13921 - DNA, 617 bp, Gossypium hirsutum
aaaatctattggcatcacacgtgtaaacatgacctccacgtgtaccacgaatctctttctcttcaatgataaccccccaaaagattttcaattattccaaaaagttttattacattttaatttaattaaacacaacatattaatgaattatatgcattttgaaatagataatatattatctctaattttctgaccctatataaaattataccaaatatacattgattgaatatttggtaaaaatctaggtcgatgccacatctataccccaatcttgattgtcgcataactattagctgtcatctctttcccattcttcaatacttgtctttttttatatttcattgctttttcctctcagtcttcattcttcatgaaattctagttttattaccttagaaagaagaaggaaaaaaaaccctaaaacccaaatcctctgtttttcatttgatatgcagtttggtattgaagccttaaccatatgtccaaagaagaaccaaactgagaagcattgcaatttttgtatgatgacttcaagtttcgtttctgaatcggcggcttcttgggtcattggtgattacattggtatggaaagctgctttgatctctataacaac

SEQ ID NO: 13922 - DNA, 647 bp, Gossypium hirsutum
tcacatcgacagtgttctagaattagtcttgggattcaagtattcacaccaacttcagtgtgtgatatatctttttggacaaaatatgggacctaataggtcgaaatggacgatatttcaccgattggtgtgagtagagcaccttagaatcagtcaatggtaggcgccaaaggtaatcagagtgctcgtttgtccctaaagacaagtcaaggtttggcccattctatgaatgaatcattaaagcagcgttcaggctttagaaatggctaatttttatttttattctctttttcgcaatccgacgcccttactggtgaagttttgtttactccaattttaacttcacgttactgttttattttattctctttgttgtagattgattttcttctggtatttttatcataattaacattttatataaacgtcatactgccttttttaacgcttttgtaaatggccaattggtcagttcattggtttggttttataaaaattcatttaaaaaatattaaataagataaaatttggttcaatcaatatttttttaattcggttcaattaatctatactgatttactgtcagctttttattagtcaaactggtacactgataagtttctggtgtagttccaactttgcgaatt

SEQ ID NO: 13923 - DNA, 613 bp, Gossypium hirsutum
tcaggaaattccaagagacaatagcttctggttctgagaacaagaatactattggcaatgcaacaggttatagcctttaaattcatcctgttttttcatctcccttgttttccagactatcttaaaaggttttcctttatcattttttcccatctacatagatcttattaagggcatcagatttgttttacctacatttagtaaaatataaatcataacagttcatgaccatgtggcgttaatttgaacaggttgattttccctttataatgataagcttttatgtttattttacaaaactataactctatgcttcttattgcataacctatttcaagtcaatacccaaaatcttgttttatattagtagtatatcaaagatacccctggcttctttaaggcagttaagcttaagcaaaattttgtgaaagctgtgtcaaactataagttccttatatggattggttatcttggcaattcaccaacaatagagtggctgtgttttagatgtaaaattgtcatatgaacgtgaaactacatgttcatagcgggattgctacaaaacaagtagcgtgtctcaaattttaactggtttctccagcttctgacctct

SEQ ID NO: 13924 - DNA, 669 bp, Gossypium hirsutum
gcttcaaatctgaactgccactgcttcgaatgttgattcccaaaatttgaattaagcaacagagggcaatggtctgaaaatgcatgagatagatgacttaatttaaaattaggaaataaatcccaccaaggatgattcgcaatacctctatcaagacgttctcaaatattattaattctcatacgtcctttttcccaagtaaaccactgaccattgaaaccaatatcagtgagagaacagtcatccataacttttcgaaatctacacatttgtctttccctcctagttagcccccctttcttcttagatgaatatgcaatttcattgaaatctccaataacaacctaaggaatctgtggggaatcattcagagtacgtagcaaattctaagatgtttctcgcaaattttcctctggtgcttcgtaaacccccttacatctccaagttttcccctctgaatcctcatcaatcataacatctatctgcctacttgaaaaagagagaagagagattttgcaattattattccagcctaacgataaacccctacttctaccatttgaatcaacatcaattccattaagaaaaccgcacttgggtctgaccttctccatctgataaccttgaagttttgtctcaattaaaaacaccaccgtgggacttatatct

SEQ ID NO: 13925 - DNA, 417 bp, Gossypium hirsutum
ttttcattttgttttgttttttcttgattatggtttactaccctttttaactatttgaatagttcgatatataatgtggagaaaaatcagaattagaaattattactaaatggagagaaatatgttaatggatgattgaagaagaatggagataaagactagtttcggtaattcattatttcttttttactggtaagttgtgctttcatcatgcgtgggagggaaagtgcttcatctttggtgctttataatttttttaaattttttataaacaaaatcctttacataattcacgtccatctaattattataattttaacaataatttttaatattaaactaaatgagattatgattatattctttttttaatgaattaattataataaaattcgaatctagggtacactcagagac

SEQ ID NO: 13926 - DNA, 587 bp, Gossypium hirsutum
tgtgtgtgtggtttgtagttgttgatagagggttcaattcccgataagtgaaatggagtttttcacgagaggttggtggaggtgtgactttttaataatttctggcctcctcctccggcagctcacttctgcactgctatcactttttttctattttctataccattttgttgtttaccttttttagtaattgatatacttaaatatgtctgaaattttattttatttttaataagggcagaaaagaattattataatacaatattatacagatcaatgtaaaaataataattaatgtagttattttattattaaaaataatatgttaattaacatgtgatcttaactctttttactgtttcatttatcctgatatcaatctcattttaatcaaactatgttctttcgataaacccatttcagaattgattaaaatagaaaattgacttaaagagagaaattaaatttaaaaaaaatattgtgacttaaataaaaatacattgaaatttgaatgtatatctaaataatttcccaaaaaaataaaaaaataaaaacactaaaactttttaaagatatgggttcgaatc

SEQ ID NO: 13927 - DNA, 400 bp, Gossypium hirsutum
acttgcctcatgttgtctattgaaggttgcctgatgtaaaacggtgttgccctcggtgtctttccagttcaagatttccatcatttgtaacctccttatctcctcaatcaatacccttgcagcttcaatctgattgcttttcacagtcaaatgaagggcggtttctccgcaagctgtcacttgtttaagagactcggggcaagcccacaccagttccttaacaacatccactctcccttttaaagccgcgcaatggagtggaactttgccgtctttccccttcaaaaggcatatatcatatccaaccctcataagctctcttattatctcaatgtgcccatttgctgaagcaacatgtataggactaaaaccattttcgtttagctccctagtgaatgca

SEQ ID NO: 13928 - DNA, 548 bp, Gossypium hirsutum
aagctagcaatgcattcggacggtcctaggacagtattcattgtcatcatggattgttgtctactgagatagggcaactctcaacagttccaccaaagcaaagaacacaacaagccattgaccttcaacctacaattttgatatccacaaacatcaaccatttctgcttgcaatccctcttcgttttagcagaactgagtatcattgattcaagctttaaagcctcactctctagctctgctttaacttttttattgctcgtggacaacttagattactctagacaatctcgcatcctatgcggaccacaacaaaaaaaacacttcactgacttcttctgattctctctgatcctcttggcttcgacagaacgcacaatcgaaccaagtctcattgatgctttatctgatcatccccttcgaaggcagaaaacacaaacctttttggacaatccctcatcatatgtaaacgatcacaaatgaagcatttcactgacccctttgatttgttgttgcgctttcacttgcgattaggaagttctatggaag

SEQ ID NO: 13929 - DNA, 455 bp, Gossypium hirsutum
atgtcgcatatatgagtcaatttcatgcattctactctaaaatcccaatatcatgtcatactccatagattgaaaagacaaagttgtagaaatggataccctaatacgaagaataggttggtaaatagaatttgcataaagcaataaggaacttgaacacaaaattttgcagtaaaggatcttagtctgtgaggctgaccccaatttctaacatctgcagtatactttgttgctaaatagcagaatttgaaccagcagccaaccagaaaccttctaatattgtcttgacagtattctaagtttagaaaacaattattaacattatatgttgtactataatcttcatacctcctgccacacaaatatttgattctttatactttcttggcataatctttgactgtaattccagccaattggacctggcagtagacgatgggattatgtcctcctcc

SEQ ID NO: 13930 - DNA, 577 bp, Gossypium hirsutum
  misc_feature (556)..(558): n is a, c, g, or t
  misc_feature (560)..(560): n is a, c, g, or t
gtcttcctcccgatggtgactagtgtggggagtgtagatgaccaaaagccgaagtgtaaaagctgcaataaatttcacttcggagagtgccgaatgaagagcggtgcgtgttttagatgtggttctcttgaccacttcctcagagactgcccagagcgaaccgataaagaggtggaagtagccccgaagtcgagtgctcctattccacgaggtagacctccgagatatcctggaagtgctagtggcagtcgagttgcgactaaagacactgcaaaatcagaggttcgagccccggcaagaacgtatgcaatacgcgctcgagaggaagcctctgctcctgacgtcatcacgggtactttttctctttttaatacatgtgttgttgccttaattgatccggggtcgacgcattcatacatttgcatgagattggtgtctagtatgaacatacccattgaacctacggaatttattattagagtgtcgaacccattaggcaaatcagtcctggttgataaagtctataagaattgtcctttgacgattcagggtcatnnntntcggctaaccttatgtt

SEQ ID NO: 13931 - DNA, 661 bp, Gossypium hirsutum
gatctcttcagcaaacttctgttaataaatgcagagaacagatattttaaaacaaaattgaactggaaagatgcttaaaattttaataaaatatatggaattcttgtataataatcaccacttctgtcaatattgcaacaaatgaaagatttaaacagtattttagtatatattacggaatactgataaccatgaaaccatgtcagagccatgaaaatacataaacagatgaaactttgaagaaacatatattaaaagtgggtgttctatacggctaattgtgcatctaacatcaggcacatatgaatgataaagaaagcatgatactccagatatgaaaatataggaccaatatctatgcatataaattctttacagtgaaataacaaataatcctaaataaagactcaatcatatctgctaaaaaaaataataggacaaatatttttgcatcactaaacttcaaactcatgaaggtcaaatctttattagctgtcacatgacagaatttggaatttcagatttagagaaggcgtcaagattttttcaagagatctctaaactagaatactagaagtgcaagaaactgagttgtaaaatatgaaggaaataaacaactatgaaaaaatgtgattttggcatagagcatgtcaaactaaca

SEQ ID NO: 13932 - DNA, 682 bp, Gossypium hirsutum
tgagcacttccactttgttcatgttgattatgctttcttatttggctgcaactacagttttttatatgtattccaaggctatacatggagagcttgctggggagattgctgaagagtttgcaagagagtatgtcagtttgccttttgatgatgggaaagttcctcatgttgtatctgttgtttatggttgatgaaagtaagactagggtccttttacttgtttacggtttgtttactttaacttgtatatatgaaaacaaagatgtctgaacaatgttataaaagaatagcttcatatatgttagcataatgaatgttaaatcttttcgtgtttgttgggaatgcttgtccttgaattttggagaaaagtgtttaatcttattggttttgtttagattcttccttgtgtttcagtgtttaaactgttgagaaaagtgctggtactggaaatgtgatatgttgcttgaatgggatattagagcatagtatgatttctgtatgttgtttatctttctttggttgaacatttgttgactgattcatttacttcctcggtaatttcggttgttggactgccagatcttcatgcttgaaagctttgaaagtatctaggattatggaaccaatccacaaatgaagcttataaaactgacaatgttcccaccgagataagccttaaaca

SEQ ID NO: 13933 - DNA, 554 bp, Gossypium hirsutum
  misc_feature (317)..(317): n is a, c, g, or t
  misc_feature (370)..(370): n is a, c, g, or t
ccgtagtaggccatgcaaatgcaggatcaaagaaattatttgaaaagggtagagtaggattaaggaaatcagatccctgtgttgtctctaaccagcatccatctaacaacaattcatccatgtagtcgaaatccattgctgaatctggtagtccacccagcatggtgccttgtgagaaaatggtatcttccatggcaacgttattccactcgatttggaaatcaaagaggatggcaaaaaaaaaaaaaaattttcctaattttttttttttttccccaaaaaaattttttaaaaaaaaaggcccccccaaaattttnggaaaaacccccccccggaaaaaaaaaaaaaaaaaaaaggggttccaaaaaanccccaggggggtttttttaaaaaaaaaaaaaaaaatttggggggcccaaaaaaaaaaagggttttttttttggtttcccccctttaaaaaccccccttttaaaaagggggggaaaaaaaaaaaaaaaaaaaaaaaaaaaattcctcgggggaaatccccccttttgggggccccctttttttaa

SEQ ID NO: 13934 - DNA, 683 bp, Gossypium hirsutum
  misc_feature (420)..(420): n is a, c, g, or t
  misc_feature (447)..(447): n is a, c, g, or t
  misc_feature (596)..(596): n is a, c, g, or t
  misc_feature (601)..(603): n is a, c, g, or t
  misc_feature (609)..(613): n is a, c, g, or t
  misc_feature (615)..(615): n is a, c, g, or t
  misc_feature (617)..(627): n is a, c, g, or t
  misc_feature (629)..(629): n is a, c, g, or t
  misc_feature (633)..(637): n is a, c, g, or t
  misc_feature (644)..(646): n is a, c, g, or t
  misc_feature (651)..(654): n is a, c, g, or t
  misc_feature (665)..(672): n is a, c, g, or t
gaccccagtcaaaacaggaaaacgggtcctaactcctaattagacgcaggcagaagagaagaagaataaaatgggtaaaaagagtaattaacccaaaatccccaaaaaaaaaaaattcctggccgggctttatttagttttctttggttaaaaaccaaacccccccctcctcgggcccccgccttttccgggttttttcttttcttcttccaaccatcccctcggccggggtacctttttctttttcttccttttttttttttcgtaattttttttcatttatttttttttagatcattggatttatggaaggttcttaaaaccaggacgaaaaaaccatgattaatggacggttgactccccccccccccccctggttttttctttcctttaattaaatttccaaattatttttttatnttgattaaaaatttcccaacaaaaaantgaaaaaaaaatttttaaaaattctttttgaaaaaaaaaaatttattaaaaaaaaagggcccccggaaacaaatttttttttaagggtgggtttcctgtggattttttttgggggaggtttggggggggatgactaagaaaaaaaaaanaatcnnntcacannnnntncnnnnnnnnnnncnaccnnnnnttttatnnntcttnnnntttttccgccnnnnnnnnacatctttttt

SEQ ID NO: 13935 - DNA, 660 bp, Gossypium hirsutum
  misc_feature (12)..(12): n is a, c, g, or t
gtccaaggaatnctgtgcttaaattgatcaggagaatgaaccctgatatttttgttcactccataattaatggatcatacaactctcccttctttgttacaaggttcagggaggctttatttcatctttcatcagtattcgatatgtttgataacacattacctcgtgatgagcctgcaagattgatgtttgagagcgagctttatgggcaggaagcagtgaatgttgtagcatgtgagggtccagcaagggttcagaggccagaaacatacaagcaatggcagattcggatgacaagagcagggttcaagccacttccattgaaccaggaactaatgaccaaacttcggcataagttgaaagcttggtaccacaaagattttgtaattgatgaaaacaatcactggttgttgcagggatggaaaggcaggattctttatgcttcctcctgttgggtacctgcagaggagtcttgaccagaatatgggctggaaccgataaacatgaccaatatactctttgaggaacaagatgacttgaaaatacggacataggtaacacttcctcacaagattcctgtgactgcaagttatgcatcgtgcattgtggtgtcattttggaggtggattgaggggccgaataaagctttggagttcctaa

SEQ ID NO: 13936 - DNA, 458 bp, Gossypium hirsutum
atggcaactttaagtgaggtgctagtgttgggcatgggtacttctgattcctgatttagtagccattcattaatgttataagcattattttttgtttgctgatgcctgttatttaagattgaatgagtggctaatcaatcctgtgaagatgaaaaacccctctgttccttctgtgctcatgcaattgtacttatctctttctattttggaattaaacactatttgtagttgttaatgtagttgtgaaatcacatagcaatggtttaagggactaattgttacaatctaaatgtttttctctaagatctagacaactatatctgcttttgggaagtaagctagtaattttcattgatactattctactagagaacagtagttatttttcttagggaacaatgtaatctacaaagtataatcttcatagttcctgcctttgtagtttacttcgctaaaaa

SEQ ID NO: 13937 - DNA, 504 bp, Gossypium hirsutum
ttgagcaagaaagtaagacaaccccttcttcgtttctaacaacaatccctgaggcagattggtggtgattcacatcatatgcaccatcaaaattaatttttacgaactcactaggttggtaactccatcttcttatctccttcccctttactggatttctcatttctaaaccatttagtttagccatatagttgttgatgaaatatgctatttcctgacctgtactatttttctgcctatgtattcttctgtttctctctccccagatcgcccaaagtccacaatagaagaggaggctctgataggaagtaagctgatcaaaaatccaggtaatccactgtaaaaaatccatgtcaggatccagaataatattctgaatttttaatagtgcccaaacttccactgtgacaggacattcgcgaaaaatatggttaattgtttcagctctttctccacatcgagggcagcttgacaaactttttgtggtgcatattaaccctcgta

SEQ ID NO: 13938 - DNA, 660 bp, Gossypium hirsutum
  misc_feature (10)..(10): n is a, c, g, or t
  misc_feature (67)..(69): n is a, c, g, or t
ttttcattcnaaacttgaaatagaattgggttgttttttttcctttccctgtaatggaaagagaatnnngatgtactccaatgtttgttgcaccattttgttttgctttgtcatgttgcaaataaacacaataatacaccaagttgcttcaaagtggtgaataacaagttgagcaaaagtaatagaacatagaacgtatttcaacctggcatcattaattaaatttagtgtatcaatcagtgaccagttttttgccgttcaacactgttccaagcacatgaaattgttgttataggtatattttatagggaagttcccgctattggggatgactcatcgcttgcaatcctaagcataaacgagaagccgctgaataatagtgggcagcactatgatttggttatagataaacttaataatctgcaaaaacaaatccttggttatagtggagacgccatttaaagaaaaacaacaaccaggttgaataggggaaatatccaaattgaaaagagaaagaggtaaagcatatagggaaacatcttttttctggacactgttttttcgaccgtggagatgaactcatggttgcagaatattgggatgactgtatcccacactatacgaaaaacaaaccctccgtttaagaaaccatggtgacaa

SEQ ID NO: 13939 - DNA, 611 bp, Gossypium hirsutum
  misc_feature (573)..(573): n is a, c, g, or t
  misc_feature (591)..(591): n is a, c, g, or t
  misc_feature (604)..(605): n is a, c, g, or t
tgaggagggtgccaagtgggatttgttggccatcttaccgttgacaaactccaacttcaaaggtagactgaagatatggtaaacttaatttttgcatcaactaattcatgctttgttgaagtatcatctgctcttctctttcatatcgttttaactatgcttatttgtttataattagggtctatttgaaatgtcttttttttttttccccaaaaaaaggaaaagcaaaattccctggtttccccccccaaaaaatttaaatttaaatgggaaagggaaggggaattgcggcaattaaaaacaaaattggggggaaaggatttaatgggggggtttccaaggccccccaaatttttttttttttatttacgggtttaaaaaatttaaaccttaaaattaaacaaaaaagaaaaataaaaggtttttttgggtttaaaaaaaaaacaaaaaattgattttaaaggaattttgggtttttttttttaaaaaaaagaaaaaaaaaaaaggaaaaaaagttttggaaaaaaaaaagggggttatccaaaatggggttttcccggttttaaaataaanttttttaaaaaaaatttnctaggaaaataanntccccc

SEQ ID NO: 13940 - DNA, 653 bp, Gossypium hirsutum
aaaccctaatcgtgttttctaaccagaacttttctctctcaagatcatcttcaatgatagctctcaatttttcagcctaatatttgcagattttatcacctagtggcttaacagttcgcataggttccaaaccctgaggaactacagagaccggttggggaacaggtgggggtggaggttgttgagtagccgggttcattcgtacaaactcgataaaccatttgttcatcatctcgaagaaggcttccttagcctctcctcctcggccctcagatacaagtcgtgtaccactcgacgctactctgtgaccggaggcttgcgtgttactttcaacttcatcggagtcggctcggttggaagtcattactatatgaaagcatattttaaaatgagtcaagagttatcacactatcataggttatataattgcatgtatttctagactcatacacgctacattcaatccgagaatcggttaaaccatagctccaataccactaaatgtaaacctctaacatgaacctgtcgtcagaatagggttacggagcattaccaaaagttttaaattcaaaacattcaattttcaaatatatactaaactatggcaatatcatcaaactcatacattttttcccttatatgagtcctcgatg

SEQ ID NO: 13941 - DNA, 655 bp, Gossypium hirsutum
attttctcgttgaagggttccatagaaatattctattgtcgtcgtctattagagccagcaaaccattgcaagagcaccagagctttgaaacgcactggaagcgtagaagatttttacacttaagccacttagtatttcaatggccaaatcatgcaagagggtcgccttagggtttttggacggataagtgtaagtaaagaagaaaagttttttaaaccataaaaagaagcgtgaaaaccgatgtttttaaatgaaaggttcttttttattcaattattgcattttttattttaaaattatggttaaactacaattaatgtcattaaattattgaaaaatttacgttttgataatttaattttaaaaacttataaaatgattattgaaatattagaaattatttatttaaagtactagggtattctttttttcttaaatctggctagcaaattccaagcgataattcaatgatcgatacggtggattagtaccccttaatggttagaataacatactttagatccaagtcaatttgacggttagtgtcagagattgaagaaaaaagttatttagattttagttcacaaatttgtgacattcaaattgtgtcataaaagtaaatgagctataaaagagacaaagaaggagagcttat

SEQ ID NO: 13942 - DNA, 670 bp, Gossypium hirsutum
ttctgcaaagctgagattatgggtttgtttattttttcttttcgtctttttattatcatattcattttaagtggtttattgatattaatcgcttgttctttttgacagaaatcaaagcggttgaactttgttcagcatcggttagtgataaaaaattcgtctgggtttgatgaagattgttcttttgatggcttttctgttaaacccaacaagcttttcatgcaagaggtacccttttctcttgtatcttggagtaggtggttcttggaaattgttttaattgttttaaagtagcaattttttattactgggtatttttttgtgtgatttttctcatggaaagaaggtagcttttcgttaatatctgagtttatggtacattccctgtgaaagaagatagttcttggtaaattctgtgaatttagtagaggagttgttttgggtttagttttgttttttctttaaattttatgtgtcgataaattttgatggttttgttcatgttttatgccctttaggctattggagccgagtatggagaaggttttgagactttcaggttggacgggcctttaaaggttgatgtggtaaggaattttaagttactctttatccattcgattggtttatctggttttctacaagtttggccatgttattatcctacgga

SEQ ID NO: 13943 - DNA, 639 bp, Gossypium hirsutum
  misc_feature (625)..(632): n is a, c, g, or t
tccaatatagaaaaggtagtgcacaaagagacaaagggtgtaatataaattttgtcactcatcgaggacaataaagtcattccaaattaacgggtatggatatgttttagctattgtccttttacaacgaacaggtaaaagctgttatttccaaaagaaaagaaattgcacttaaaagaggcaaaaaaaaaaaaacccaaaaaaattttaatttttaaaaatttaaacccccaaaaaaaccttttccccaatttttttttttccccaaattttaaaaaaaatcaaaaaaaaaaaaaaaaagggttcccccgtttccctttttaaaaattttaaaaaaattttaaatttttcctttttaaaaaaaagggtaaaaaaaatttggaaaaaaaaaaaaaaaaaataaatttaaaagggggaaaaaaaaaaaagggggtttaacctgttttttggggaaaaaattaaaaagggaattttttttaaaaaaaaaaaaaaacggccttcccccaaaaggggggtaaccaaatttttcttttaaaaaaaaaagggttaaaaaccccccaaaaaaaaaaatttgaaattttggaaaatttatttaaaaaacctgggaaaaattttggccccccannnnnnnnggaaaaa

SEQ ID NO: 13944 - DNA, 670 bp, Gossypium hirsutum
agcaacgatatacgatttcgccaacaattataatccttaaatttgcagtccaagtatagttcatttaaattaattataatcgatacatatattttgaagacttacctttaagctttccccatggaaaacatgattggcaagcttccgacgcttcaaccatttttcaccctgaatcaacacaagcccgttccccagtaggttgctaaaataaatcgaaggcttcttttttggaaatatattttcattatttttcagaacctctctgactagttcaggttctgaaatcactagtacagctcgaataccattccaataaatataattcctccctaatcaaacaaaaaagggtacatcttttcttagaactggtgggtaagaataaaaataaacttataaaaattaaccaacgcttctaagcttataacgatgccacttttttcaagattcttttcttctcatttatattttgatgtgttaaaaatgttacaaataaataaatctcaagaatataataaaacccaataattatctatattttacattaatgaaaataatacactaaacatcaagtggagtataggaaaagtatcatattctataaaaacgtctgcaatgttcttgataaaacaacctttgaatatttgaagatgacggagaatggagaaacttt

SEQ ID NO: 13945 - DNA, 661 bp, Gossypium hirsutum
gttacgacaagttcttggtctatgtctaaactcttacaaatcaatctcaatcactttttcaaaacatgaatttaatgaataatattaccagggcttatttacacattacttttattaaattttaaaaaacgatactttaattaaacttttctttctaaaaaatcacctatactgaatatatatacctataatcgcatttattgcaagagtttgacacacggacggtgccaagggggcagctgcctccccttaaaatagaaaattatcaatttaattttttaaattttttaaaattctaaactaataaatatatacaaagaaaaaattgtactttaaactctttacaattttataatttaattttgacccttcaaaaataaatttctatcttctctgatttgacatgtacaatggcttaatttttgttcacatgtattgctcatgaatcatgcaaattagtaggttccaagtcatactagttgttcacgtcaaagaatttgcttgtgcttattgttaaatttgatagaattattataaagatgatttgtttgtttggtataaaggataaaaaatttgtttatcaaatgctcaagacttaagattcataactattagatcgaaaagtttttcatccttattctctccatcttccaattagcac

SEQ ID NO: 13946 - DNA, 712 bp, Gossypium hirsutum
  misc_feature (679)..(681): n is a, c, g, or t
  misc_feature (685)..(686): n is a, c, g, or t
  misc_feature (692)..(694): n is a, c, g, or t
  misc_feature (700)..(709): n is a, c, g, or t
tggtggctgtggtacagatgagtagaaaccctagggtttctgacgttttttgggccactgcaatttgggcctattttttttgggccactattttatcttattaattgggccactttaattagggtcttttagacccgggtaaaatttggcatgtacataaatcattccctgttgatttgttgatcatgttgtttagtgattttgatgtgattctgggaatgaattggttaactgagcatggtgcgattttagactgtcataaaaagaagttttcagtccaaagtttggatggtgaagttatggaaatgaaaggcatctaatcaagtggttcaagtcatgtcattttattgattcgagctaataagcttctaaatcaaggctgtgaagcatatttagcctacattattaactcaaacttggatgatagaaattaaacaagattaagacaatatatgagtttccagatgtgttccttaagtaattgccaggattgcctcctgatcacgaggttgaatttgcaaatgaagtttagcctagtacaactcttgtatcaattgcttagtatcgtatggcaccaacgaaattaaaagagctggaaattcaattgcaagatctcctagactgtaactttatatgtctcaatatatcacctaagggagctctagtattgttcgactcnnncccnncccctnnncccccnnnnnnnnnntat

SEQ ID NO: 13947 - DNA, 529 bp, Gossypium hirsutum
  misc_feature (507)..(507): n is a, c, g, or t
  misc_feature (513)..(517): n is a, c, g, or t
  misc_feature (522)..(525): n is a, c, g, or t
caaagtccaacctcacaaccctatttcttttagtacaagcaagatgttgaatccctccttgccggtggcttctagaacccgaagtaggatggaagcctactggtccgaggtctgtcctccaagcaagcggaggaacaacaggaaggaggtggtggtgcaggaccccagccccatacctactaagaaacactccggtgaaacccaattcttgtacgaagcacctaacattgacatacaccgctgtaaacaagattccagacaccctgctaatatttccaatcttgattataatgatgaagaagaagaagaatatgatgatgatgatgatgatgacgacgaagacgaagacaatgatgattcaatggagggttctcatgaggctctcccctctccaagcgaagaagacaatgatgaatccgaggatttggattactgtggggaagaagaggagaaggacgtcttttatatcaacgattctacatcttccggtaccgagtctaagaaaancccttnnnnntcctnnnncttt

SEQ ID NO: 13948 - DNA, 600 bp, Gossypium hirsutum
aacctaccctcccttcccaggttcaaatttgatggttgtaaactgaaaatcccaagtttaagcagtgacacatcccttggggccacaaaagcagcaaactaattatcaacactatgctttattctccaacaatggaacaaaagaagcatctaacatggtatcacgagagggattgaatagtctactttgcaagttttgggtttaacaaataattctccattttaaaatgaaaactaaaacccgggaaaattgaaaattggacaaaaacatggataattaaatatatatatatacatatagtgcaggagaaaaagcctcccaaaactgtcaaagactttatgttgctctgactcttcatatgaggccttgaccctccatatacaaggagaaacttaaaccgagttcaacacaaatgagaaacattcatgctcaacaagctctcaattctgagaagcaaagacaatagatgatcaagcacagcatctcccctttttgaacgatgaaaagcttgattgatccttgaccaggaaatagtcaaactataactacaaagcaagatctaattccttgaatcactcgggcaactacgactcaataatc

SEQ ID NO: 13949 - DNA, 611 bp, Gossypium hirsutum
  misc_feature (241)..(241): n is a, c, g, or t
  misc_feature (253)..(253): n is a, c, g, or t
  misc_feature (559)..(559): n is a, c, g, or t
  misc_feature (604)..(604): n is a, c, g, or t
tcaatgctatgacggttgtaaagagaaatcttacggcagtatacggtgggttgcgccaatatgaccagtgttgcttccataaacaagctgtgcactgcgtcaagaatgattgagaatactgtgttgggaaataaagttccttggcaccgggagcaggtttgcttaaatcttcaataagagctttgtttctcctgaacaaatgacatgatgcatcagtagcaaattcaaggtagccaagttnaataatccacanatatgtcttatatatgctaaactaaagtaattagttgaatttgattatttatttattttggggcaatgttgtgcctagctagcttattacctgtataggtctgagtttttatagatatcagcaaaatcaacacctaaagataactcttgcgctgatgcggtaacttccaacatccaagttgcgggattgtatccatctttgattttgctgacaccttgaattccctgcagaagatggacatcataatgttagatgcagttttcatgtgaactgagaaatgcatgaagttcatgaactttgaaaatngttgtctttcattacttcttacctcaaagtatctgataagatatntagaatg

SEQ ID NO: 13950 - DNA, 651 bp, Gossypium hirsutum
ttcgaaaatacttcgaaaaaacatcgataataactgggtaagcctaaaaagcttctaacttcagatatattccttaacggtttccaatcaacaattgccaaaatcttacttggatcaacccgaataccatcacctgaaacaatatgtccccaaaatatgacttctcggagccataactcacttttactgaatttagcaaacaattgcttatccctcaaagtctgcaaaatagttcttaagtgctcagcatgctcggactcgtcttgagagtaaaacacaacctgtaacaccccttacccgtatccgacaccggaagagggtatgaggcattacatgagtaaaccacaagcaaacattcaaaatcgggacatgaatttccactcaaatgtaaaaatttccataaacattcatatcgtcccttaaacgagtctatgaagctcaaaacatacattgggatggtttgggactaaaccgagaactttggaaactttcccaacacttagtaaatttttcataaaaacaggggtcacactcccatgtggcttgggacacgcccgtgtgggtagtcagtatggtcacacacgcccgtgtccctaacccgtgtaactctgtttatgatgtcatcaacaaattgaagtcatacggccaagt

SEQ ID NO: 13951 - DNA, 756 bp, Gossypium hirsutum
  misc_feature (577)..(584): n is a, c, g, or t
  misc_feature (586)..(596): n is a, c, g, or t
  misc_feature (601)..(602): n is a, c, g, or t
  misc_feature (604)..(605): n is a, c, g, or t
  misc_feature (608)..(614): n is a, c, g, or t
  misc_feature (618)..(620): n is a, c, g, or t
  misc_feature (634)..(639): n is a, c, g, or t
  misc_feature (642)..(664): n is a, c, g, or t
  misc_feature (674)..(678): n is a, c, g, or t
  misc_feature (680)..(680): n is a, c, g, or t
  misc_feature (685)..(690): n is a, c, g, or t
  misc_feature (693)..(693): n is a, c, g, or t
  misc_feature (697)..(697): n is a, c, g, or t
  misc_feature (699)..(699): n is a, c, g, or t
  misc_feature (701)..(705): n is a, c, g, or t
  misc_feature (709)..(715): n is a, c, g, or t
  misc_feature (717)..(718): n is a, c, g, or t
  misc_feature (725)..(725): n is a, c, g, or t
  misc_feature (727)..(728): n is a, c, g, or t
  misc_feature (730)..(739): n is a, c, g, or t
  misc_feature (750)..(750): n is a, c, g, or t
aaaatattttctttatcattttgactaaagatttattttgatattttgatatattttcatgttattacatgaatggttttacttacattgtttgcatatatatatattaataatgacgttaattaagttgtatcacaagtcaattcaatataaactcaagaagaagaataatattgtgataaataatcagagtacatttaatattcttaatctgatgtatttaattttttaattttttacttaaaattgaaaacaatttttttatgttaattttgtacgataacatatattactattgttagttttaaatcttacattttattattatttttatatattatttttaaatgtttatgtacttgtgataatttttttggtataaaattaaatgatttaattttttttaaacaatagaatggattatttgagtagaaggaacttagagaatttttaaaatcaagccatgatttcaacatgaacacttgcctctaatatcaacacaataaaagaaaaacaattaaaacatgacacaataatacaaaagaaaaatacacaaatgcaacacgaatatgcaagnnnnnnnntnnnnnnnnnnnttttnnannggnnnnnnngggnnntgcccttttccagnnnnnnggnnnnnnnnnnnnnnnnnnnnnnnaatttttttnnnnnantatannnnnnctngaantncnnnnnttcnnnnnnngnnttaaccncnntnnnnnnnnnntctctattttnttcttt

SEQ ID NO: 13952 - DNA, 384 bp, Gossypium hirsutum
ctgtgtaataactcaaattgcggtcacagttaacatcctagacatgagcgtcaacccatataattaataattaaaatgaattgtgaagattataaagttatctagcttcttgggtccgggttaaattttcttatctatgtgagaatcttctaaggatgtatgcaaaatattcattggattgaatcaatctctcatgtcaacatcacagttttctcgacttttcttataaaaaaattagcgtcacattgccactggtgtatgatgtttattaactgcagcctcctctctctctttctctctccctctctcccccctccctcccgagtatttttcttacacgagatgagctttttacatctaagatgtttgggatactgttctctt

SEQ ID NO: 13953 - DNA, 657 bp, Gossypium hirsutum
tgtgaaaggaatgttctgttggtgtgaacagcctttaaaagagctttgggcagccgaatgttcattcttggagagttggaaagcttggctgaaaaattacttggaaaacaccaacaatcagctcacaattaaatatatccatgcaccttgccgtccaaaagatgaatgtacctgcagcaattaaaatgaatgaaattcagcatcaaatgaatgtaaaaatctgcacttaaatttcagtcatgacattttaaatgaaccgaattaagttgtcttgacttaagacattttaaatggctgtagaacaaaaacaaattaaattagctcaaaagaaatttaaatggctgtaataatttagacaaattaattaactcaacttattaatgccaaaaataataagacacattaaatgacttaaagacacaattaacacctagttaaattagtttattagcttaaactaaattaactaaaatttattccagcaaaataaaatgcaaaactaaagaaaactaaaatgagtttattgagctaagtttgagctgaattgagctcaaccagctgaaattgagctaattcaactcgcaaatacttgcaaacgacacttaaaaagttggtcctaggagttgctcggggcgtggtcgtatcatctagagcttc

SEQ ID NO: 13954 - DNA, 673 bp, Gossypium hirsutum
tggtatttctttgctccaaccaaaaaattatgatgtagtccattcaatgaagccctttatgtttttttttcaaaagaaaacatctaagtgaaatagaaatttatccattttatcgtgtcattgagttgagagtgtcattcagcattcattctgacggtgcactttattgatttattgatttttcattcgaaaaagttgataaagaagaaatagataccaattaaaactatttttgggttggtgttaattaaaaaaacatggattataatttttattaaaggcccaatctttgtaccttactaattttttttgtaaaaaacattcaaaggtaggcttaagccttaaaaagcccataaattaattaagtttagaagagtgaaaattggagctaaaaaatctgaaatatatttaatcaaatctcaaacactaaaccaaagaaaacagagggatatgtctaattgccatttttctcttcaatctcatctttgtctgtcagtctctcccaaccctttctaagttatagcttcaacgcctgagaaacgctctcttcaattctccatcccatctccaccgtccattgtgttgattttcctttcgtttggccacaaagtcaaactcttaactatataaaaatatgaagcaaaactcaaattacagaccgatcagtgcaaac

SEQ ID NO: 13955 - DNA, 762 bp, Gossypium hirsutum
  misc_feature (645)..(645): n is a, c, g, or t
  misc_feature (647)..(649): n is a, c, g, or t
  misc_feature (651)..(713): n is a, c, g, or t
  misc_feature (715)..(758): n is a, c, g, or t
ccttgcttctttgaaagtgtttgagtgaaggcagcataagtgcattggtcacataggcttgaaagtacccgctcgtgtcctattcagtcaattccttgtttagtctttttgtaaaagtttcgctgattggccctgctagtgtgcgaatcccgtagcctcttcttctactagcccttcccgcggaaaaccttctcaattcaattgccgatttttgagcgctagaaaaagccctcttatgggtctttgtactagttctgccttcacatgctcttttacttgccctgatccgccgtccaatccacatgcattcattctactcggtaaatatggcttagctggctccccgcccgcctctctattattgataggctcggtaggctaagtaagtacttccattagccagtatttctcgttgaattaagatacaaccgataaccgatatgccaatagaacttttctttcggttgcatagaggaagataagaaagtattgcagctcacctcgtgctttcatcaaaggaaagactcggctctcactttgttaacataaggcataagaaagttttttcaaacggaaggaagtcccacttaattatacaaaatggttttgttttgtcccatttcctgagttacacgaattccgacntnnntnnnnnnnnnnnnnnnnnnnnnnnnnnnnnnnnnnnnnnnnnnnnnnnnnnnnnnnnnnnnnnntnnnnnnnnnnnnnnnnnnnnnnnnnnnnnnnnnnnnnnnnnnnntata

SEQ ID NO: 13956 - DNA, 590 bp, Gossypium hirsutum
  misc_feature (45)..(48): n is a, c, g, or t
  misc_feature (525)..(527): n is a, c, g, or t
  misc_feature (547)..(548): n is a, c, g, or t
  misc_feature (568)..(578): n is a, c, g, or t
cggatcaaaagaaaccaaagcaagttttttgacacgagtacttgnnnnataattctttaaagaccctccaaatacatgggaaaaactttaaaacatcgatttcatacacattccagtaccttcaagtatcatagaatttaatggttcacaaataatgagcaagtctagtaaacttgtgctcaccaacttttggacccgtctcctcattgatttgatctagatgaccctacatatacaaagtaacaacaaagttgctcaattaggacacaacaattgtaaatgagttcatatctgttcgcgaataatcgtaataacattcgttatgtccgcaactatgataaactaatagaaaaatgcatccatgactgtcaggggcgtaaatagaggtaggcaatggccttcactccaaagatgataaataagctttttaatctctttgaaaagaacattgttctggcttcgcctcgaacgactagagtctaaatatgcatttcgatattctaagcttcctataaaacaattcannntccctacatacattgcaacnnagatacaaatcaacaaaacnnnnnnnnnnnatttaaaaaaaa

SEQ ID NO: 13957 - DNA, 615 bp, Gossypium hirsutum
tccttgtttgtcgaagagtgctcggttttgtgtcgatgacttgaacggcgttcttccatcatgccaacttcagacaccatcgagtggttcggaaaagaagggtaatgctaacaacggcaataagcaggaagacccttttgtggcggcatttaggaaatgcacggagtactcaacgaatagtaagtcggggggtatcgatgacaaaatcgacgggacatgcaagactaggaacaagaagaacatgtttattttgtcgtgtaagtattcgtgtaatgttagtagttgtaatgttaagagtgtgtcggtgtttgaaaggaaaaaacagggttgatttgcaaaaattgaatggacaacgtgttaaaaggttaaaatgtcacccttcacaaatttaaattttagtccttatactttttgttttcatgaactcagtccctctacttttaagatttcaaattttaggtctaactcttaatttttttggttaaatttgtgggtgtgatattttaaaataaaataaaaattacttataccgtgtaactaaaaaaaaaaggtaatgaatataaatttgacaatgtaaacataacactgttaacggtagggcctaaattctgaaat

SEQ ID NO: 13958 - DNA, 348 bp, Gossypium hirsutum
  misc_feature (205)..(205): n is a, c, g, or t
  misc_feature (214)..(214): n is a, c, g, or t
  misc_feature (234)..(234): n is a, c, g, or t
  misc_feature (246)..(246): n is a, c, g, or t
  misc_feature (311)..(311): n is a, c, g, or t
aaaaagccaattttaccgagcttaattacgaaactaatttaataaatatcaacattcccaagctatatttaaccaaatcacgttcctcgttattatatttcctttcctcttcaataaattcaggaatctggaatccgagttgaaattcaaaacaaataaaaatcctcctttatcattattatatacatccatcaatctaatatanccaaaaaanaaaccaggccaaaaaaaaanaattttcccccnaaaaactacccaaaaatgaacccaaaaagcccccaaaaaaaacaaaacaagaaaacttggaacanaaaaggaaaaggaaaatggtaaaagaaaaacttaaaa

SEQ ID NO: 13959 - DNA, 616 bp, Gossypium hirsutum
tcatccaaactcgctattcatatgcaattttacttgtaatacatattgctttgatgcaatgaaaattactcgcttaggtcccaaatccatgcaaatgaaggtgtatcatggaggttttcttctttttagataaagacagcctcaggtgaaaattaaagattacattaatctctccaatctttaacatagcccaactcaactaaatcttgatcggactttggaggttcactaaaccattgaatacccgtgaaatttgtcgtaattgtattctgtaatctcggaatgtgacaaataagaaccttccaattacgtcttaacaaactatgaataagaggcaattccaccatattactaaaaatggttaaaatgttaaaatttcatccatttatattattaaaattgacgtggttgaaagaatacaatactaataatgtgtacatcatgttaatatacaatagaaaaatatttattttttttcataaaggggcaaaatgggttgcttttacctacatatgaaacatactcagaaactgaagagttactcgaagaacatgcttttattacaaaaaccacacttcgtctccaagaattcactcttcgaaatatgggcataggt

SEQ ID NO: 13960 - DNA, 576 bp, Gossypium hirsutum
  misc_feature (463)..(463): n is a, c, g, or t
  misc_feature (505)..(505): n is a, c, g, or t
  misc_feature (552)..(552): n is a, c, g, or t
  misc_feature (555)..(556): n is a, c, g, or t
  misc_feature (560)..(565): n is a, c, g, or t
tgaaaagatgatctggttgagtatgagtaaatattatggtgtatttttttcttcattccaatttttttgtttggcgttgttaatttagagtacaaggtacacgcttacaacagaaatggacttgttgccttgggatttatggatgaccactatcctgttcgaagtgctttttcgcttctcaaccaggtaaacgagctgcagctttattttttctttgtcttaatgattttctttaagcttcaatatcatctaatcttattaattgcaatattggtgttttgcttttagttgtactgagaagtgagaactaagttcaaatttactgggttcttactactttttcatatgaactgtcttgtttcaagattatataactagtatcagtaacgattacaaaatttcttttaaatactattagtttttgattgatgttcactagtgactcatgtatgtttatgctganacttggctcatatgttggatatggttaggctctttgtattgnggatagatagatgaaggttgttgcctcttctctttgcatctgatagngannactnnnnnntgggtggagga

SEQ ID NO: 13961 - DNA, 652 bp, Gossypium hirsutum
tttattaccagggaatcatggatggagaatttatgctatgtgtagtaggaatattatttttccaacatgtcttagtacatgagttagcaacaaactaatttcacttgggaatttttagctaccaacatgacttgttttcagcaaagggaaggaaacatttttacttattttgaagaggttttattttttgctggagttttactcatccttctaatttcgagtttaaatttgtactagttattctttatgttataacaaactattttaatacttatgtaataattaagcttttccttgtgttaatatattaaataaccaaacaaggcattaaggtataaaaagatagagataaaataaaggtactgaaccctatacattttcctatatttgttaacttaagcattggactgcatcccaagatgtcaactctcattcctcttcagaagaccatcgaccagtatcctatatcccacatgtaagactagtttccaaatccaaataagacaatggaaaaggaacctgatgccaaatatctcaatgatctcctatgtggaatagctatttccaacttcttttttggataagtagatgacttttattatctgagctgatacgatacggaattacaactcatgtcccaggttgtacaatt

SEQ ID NO: 13962 - DNA, 673 bp, Gossypium hirsutum
tatctggcaggtttctgtcatcacgtggtgccttagtgaacggaagctttttcttctccacataacgaactgtatcataggagaaataaccaacccatccacctacgcattacaggaattactagaaaatgtgagcataaagacttataaagaaaccgtatggatccacaataaaatgacatcagagttttcctacaccgtcatgaaaaccaactacttacaatgggaaaatcttaataaaatcctgcacctaacaggttaagaattaaggcacccaaaatgttgctggttgaatacaataaagtagcttaatttcaaaatacttgattactactgcatgtataaatctatatatttgccaaatagggtaccttcattcaagttctctatcatttatagccaaatacagaacttaagagtgggtttgcaccctatttaatcaacaaatctaaccatctttcgtgtgaatacacgatgcacacatcacatacttgtagtgctaaaattttacaatttcttcaatcactaatcagtttttagatcccccataatataacagatactttatgctaaccccatcatgcacttttgaaccactcaaacccctgaactttcttaattcacacataactcactaagtctgacaaacacacagcattctacatgtggcata

SEQ ID NO: 13963 - DNA, 631 bp, Gossypium hirsutum
aataatatatacacacattgataagataaagtatatatacttgttcaatgttaggtttatttaacttttatttgtgggaatttaaataaaatattcattttgaaacatgaattcataaaagaaaatgtataattgaatataactctaaattttttttatttttctataaataatgatttttagtaaatttataattgaatcgagattcatttgattaatgagtgacatcatgataatctaaattgtatcaagttaatcgtttggttgaaataagaattgttagggtactaattttgagaaagattttagattaattgaattgagagttgatataaattaatataattgaaccgatttttaatattttattaatttatttaatttaactctttaaatcaatgaaattaattaaattattgatcattaatctaactcgaattggatgtggttttaagtaaacaagatatattttgttaaagttgaaaaagaaaacacaataagttgagaaaataataaagattagaagaaagaaaacatcgtaaagcgaaaatcgaaagcattggagggatagatgggattgagtgttaagatcggcaaactcagcctgtctttcttcatcaatctcctcacg

SEQ ID NO: 13964 - DNA, 591 bp, Gossypium hirsutum
  misc_feature (521)..(523): n is a, c, g, or t
  misc_feature (562)..(563): n is a, c, g, or t
  misc_feature (569)..(579): n is a, c, g, or t
  misc_feature (581)..(587): n is a, c, g, or t
tcgatgattttgatgagaattgttctagcttggaacaatcttccttttcggacttctttagcatataaattcgacccagttattttcgtttcgcggcttttaaattgctgaaatgaggttttaacttatgaattgcgcaaggttccagaattgtgatagtgtctgttgaaaaatccccttttatggtaacatttaaaatcagtttcaatagatcatatttcattcctactaaacgaaagcctaccctcaacgaattacattttatagaaataacgaatttgcgttttcgttttcatttcttgtatcgaactaatccgcattccaggtaacataggattcaattttctatctttgaagagccctgtttactaacccctccatagttagtgctatttctttgctctagtgggtggtatctgctaaatctctgttatttcgaagatatttgtttcctaattcctaatgctgttatgaataagggaggttctttatgttcttccacatgtggtctttgtgagtgnnntatatgtatgtgaacactgctagtaatattttctttgtnnctcttnnnnnnnnnnnannnnnnnaaaa

SEQ ID NO: 13965 - DNA, 616 bp, Gossypium hirsutum
agcttaatacataatacaatttgagaacaaatcttatcatccgttctttttttcgttcttttaaaggatttgtctgtacatccttaatacataatacaacgtgatgaatgctgattggtgaatgtacctgtccatggtgaataagggagaccaatatgtactttttaaaagcctcgacagctatagcattaacggtagacattggagcggtcacaacctagaaaattaccatacacaaataaaattagactaattggaagttaagactctcggaattttcgtagctgaccaataatttacaacagaggtgtaaagaagtaacatacattgtgtagaagctccaatgctttctggaaccacttttgtccaatgcttatcattcccctattgtaatgtcaaatgggaaacccaaataagttattcctcctcaatgatgttaaacagtgtaacagtaaaaatcgaacagtttgagaagcaaccaacccgtaatagcaaaaaaggaaaaggtctcttggttgatcaacctcgaaaacatcttcttccagaatggaaagaccagctttatagcaccttgacagcaaacaaagcaagagaaactccgggtgtaaagcagtca

SEQ ID NO: 13966 - DNA, 655 bp, Gossypium hirsutum
tttctcgaatcttataaattaagatcttgttgaatagaggtttgtttatttatggtaattgtaaaaataataatagcagtaaaattaaatattttataaaaaaaatgaaacgcattacattaaagattaatgtttatttaaaacattttttgtgtgatttgtttttattattatttatattaaagtctaatcttgtacgtgatatcattattttatcttgacaaaattcttcaatgattgatctctagtcgttggcttaatcttggtaatttccatggttgcaccattatacaattgttacacccctatcaaatatatgagttgtggcaagctgtcagatactatatatgtgtggtgttttgcaaatccttgatgagttgagataggtctgttttttatatttttgaggttttaggtaaaataataaagagaggttttaagatctttaaaagttggcgaaatatttttttaggtcccttgaaagacattaaaaaaaattttgggcccttaaaagttagatttgttttagtcctttaaaagttggtaaacttttttttgacctttaaaagttttaaaaaaatattttgaaaaacaatattttgagcccttttcagtcttgggcattggacggtcacacctctagatgacccttaaa

SEQ ID NO: 13967 - DNA, 691 bp, Gossypium hirsutum
cgcatggaacttaataacaagaagcatgagaaacattgtaagattaaagtaagaaacaaataaacctggatgtatgtcaactccaaaaacctgaaaagtatgtaaaagaaatactaaatggcatatgaaaaagggtatacacctaatcaaatgactagatgtgaaacttatacctcactaatccggctttgcaatgccagtgccaacacatttcgcccttgcttccacaaggcatgagctactcgatatgattgcagagaatggtatccctgaaaaaggatggaacttgtaaggacagtcagagacagaattcgatgcccaattgttgctaacagccttatatgtcttatatcttaacatatcttctctttatatctgaaaccataataaatcaactagcttttcaccattaggaatacgccaaccaaaacaagggctgcaatgtaacagtttggggtaaaagttaagacattatgcatacacgagcaagtatccgagaaaagtataaattaccttaaggtatagtaacgctgaactatacgataaacaagcaggatctctatctatgaatgcctgcagaataaagcatttccaaatgcaaaaatacggttaaaatgattgttcggtaagaacttctacaatcaaacatcaattctatatcgtcttttctaaagattacctgcacatccag

SEQ ID NO: 13968 - DNA, 690 bp, Gossypium hirsutum
cattaatactcaattgcgatgggctttctaattttttaaatgtcaaatttattcactgcttttttaattttcctatttctatttaatttccaaaccaaatcatctcaacaatcttcaattagtattagatattcaacaaattgacctaattttaaaaataaacaattaagtacatcaattttatataatttttatcggtaacaattttagcttcaatgtttgcatttttttttaaaatttggtctttattctaaacaattcaacaaatttaacttccatatctacatgttttaacaaatattattgactaaatttattaaatcatgaccaaattaataaaatttgtaaattaggagagctaattatgtaacattgacaaaacatattagtgtgaatgattaattgtccttaattgctcacttttaaaattaacagaatcaaattgccccaattttttttgagagagatgatataagtttttttactctcaatttttaaaaaataattttttatacatttaatagtggatattttagcggagcaacataacttaatgcggcattggaagggataggtgccagataatgcaaaatattacattacaacgtggatcataactctgaattttgtagaccttcaataatttatcccaaactaacgtgaaagtgagcaatcattcccacagaaagg

SEQ ID NO: 13969 - DNA, 694 bp, Gossypium hirsutum
atgtgttgcttactgtttgggtgccgattagctttaattattgctattttagcctgttgttgttttccaatcaacccttaattatatccgtcaatttcctaagtgatgctcattgttttgtttcattgaatgcatgttaagcatgttgttattttctgtatctcttgtttgtatgactacaaagcatgccattgttttgattattgatcacgtgattttgacatgcttctgtattgtaccgtatctgattgtgctattctaatataatgacattatgcattgcatcgagtattgggttgatcggagatagaggagatctatgaagttctggtggtatttctacaattactggagttctggtgataaaaatccataattttggagttctatttgaagttctcgtgatttgtttgcatattgttctggagatttgttcacatattgttctaacagtttgttcgcaacattattcctatggtttaaccacaatgagctacgactccttctaatatggtgtgtatggttggatatggtgtgtagcagatggatgggtagggaaaatgcattaaaattcatgtacatctacttaaattctttcatttcgtatactttgacgaaacggtgattggtgatattgttgtatattttattttcatgaataggggtttgccaatcaaagtcaagtcaggcttaa

SEQ ID NO: 13970 - DNA, 647 bp, Gossypium hirsutum
  misc_feature (591)..(594): n is a, c, g, or t
gggaggtgaaagttgaattggtgaaatccatgcatgagaaagcaaaacaacggatcaccaaaataaattaagcgaatgccaacaaagctaacaggggatgcaagcaagttatctttgagcccgatgactgggtttgggtccatatgagcgaagaacaatttctgactaaacgcaaacaaagttaaacccatgtggtgatggaccttttcaagtactcaagcttattagtgacaatgcatatcaaatcgatcttcccgatgagtataatgttagtgcaacttttaatgtcactgacctttctccttttgatattatagattagaggacgaattcttttgtggaagaagggaatgatatgagcagcacggtccaattcaaaggccataatagagatgggattagtttccctcaatgcccaatcacgagatccaaatccaaatagctaaagtcaaacctcaacttattcattcaagactttatcacaaaaaaaatcgagaagaagagttgaagcttcaagatgagggattttggagcaaggatgaattagaatggattaattttgtatgtgggcctaaactctcaatctattannnnagcccatgtggagaatgttaacaagcttaggtatttcatttcaaggactctaa

SEQ ID NO: 13971 - DNA, 607 bp, Gossypium hirsutum
tcagagtactccctttctgcaatatagcaacaaaagaaatttaattgaataacagaaagaaaacataaacacagaaagagcataaaaaagaaaaggaaaaaaatgtcctccagatacaaggggcatcagggcttgttaaaacaagggattactagtgaaaaaggtgtatactatcagaatcaccatgtttgacccctgcccccaccaaaaataaaaaaacaaaaaaattccgccagaccccaaccttttcttccacactaaaggcaaatgacgaacactaaacacaaggttaagaaagggtgagttgaaaatccatctcaattcttaaatcttaaatgtcaaaactggtcatcagcatgcaaacgacttggttgtataacttccgcaataagttatgctgtcatcatactatgcctcaaatcaaatatataggttacccatccacagagagaaatgcatgtataggcataaataacatcatctccttctgccaaatacattagacagtttgtggagaggagagaccaaaaaacaatcattaattgtaagaacagattatgcctggcctatatgcttctatgccaccttaattaaaaattatttcgga

SEQ ID NO: 13972 - DNA, 603 bp, Gossypium hirsutum
gcatgtcgtgcagtttgtaaaaatttgatctctgtagggcaatttgaaagagataatgcgatgtttttcgaattttatccttttttgtattttgtgaaggacattcagacagggaagactctaccggagggccacatacatgatggcttgtataggtttgatttttctcggtctacctctcttaaacctagtcttgcttcgagctccggatatcctcttgtatgcaatgttcagacttctttatccgttaaactttggcaagacaaacttggccatccttgtcataatactcttgctcgtattttgaattcttgtaatgtttctttcaagcatagaaacttacaatttatgtgtacatcttacaagataagcaaatttcacaagttaccttttggtacctcacaaacagtgtattcagttccttttgaattagtggcatcagatgtttggggtcccttacatgtgtcatccaatggtttttcatactacatttcttttgtggatatgtatagccgatatacatggttatattttcttaaatccaagtcagaaatagctcgctattttcttcattttcacaagatggttcaagtacaatttggg

SEQ ID NO: 13973 - DNA, 655 bp, Gossypium hirsutum
ttagctgcaaagtcgctttcaattatttaaaaatattatctttaagcaactatatatatcttaaataataacaataaaaacagaggaactatatcatatatttttattaaattaataatcaattttatcattttatattttattgtataactaatagtccatattagatatgttttagagtcaaataatcggttcaaatcaaaaggtctatcagagtggttttggactattaacctcgaaaaataaatttaaataaaaaattaaactcattaaaaaatatacatcgagcttgaacttcgacttgatttcagccaaactagactcatatttcaatttttataatatgttatttttcttatatatttttatagattatgaaatttatgttaatataaatattaaaaataagataaagtgcaagaataggcatctaactatttagttggttttattttttttcatcaagctattaacttttttgatttaataattatttttattttttattcttccgactttataaaatatcattttattcctcaatttttttcaaccctctttagcccttcaaataattgtgtttgttattttcacaaaaatggatgtggggataatagaatgacgtgagattccaaactaattgagggaccacaat

SEQ ID NO: 13974 - DNA, 684 bp, Gossypium hirsutum
cggttaccttctcgctttgtagtttaaaagttcggtcatcgttggaaccatttaacatgatcgttagattgttagatctttaccaaaggcacaaaactcaaattgtgtacctctatggaagtagagaaatgacacttgcgcctcgcttggttgatttgattggttagtataataacacaaggaaaagtttattcaattagcaaatgctaaaatagttatcatcatatcaattcttaaataattcaatgtttgataaataaaattgttgtaaaaaaatagttgtaataattctgtacctccataagtaaagatattttataaaagttgattttcaggtccgttttttcttaaatatagtcatttttttatgaaaatattttataaaataaagcataaacaaatttcggtacataattttataggaataatatatttaaaaaaatgaaagttgcgatcattcttttttaaaaaagagatctcataaatttctaaattatatcaataaaaaaattatattagaataaacggaggaaaaaaacgacagtgaagtttattttttgagccaaaatagagtgggaaacataaaaattaaatgaaggtattgagttgaatttcacaaccaaacaaatgattagtgtaaaaaaaagacattacaatattaatacccataccaagcaaacaagg

SEQ ID NO: 13975 - DNA, 700 bp, Gossypium hirsutum
gtccctatgttgaaactttcggtttatatttgtttaggcatggcgcttatgttgtttatggaaagggtttatatggggattgtcattgtcctcgtaaagcttttttggaaaaaaccagaggaacggtataagtttgtgcctattgaagacgatgaagagcacggtagctcgaattttccggttgttttggtgcaaataccaatgtttaatgaaaaagaggtcctttttctgcaattttttatttctggattttcgatgctaaaacagaaggtttagggttttttttgtgtgtgtgtgtgtgtgtttcaacaggtttataagatctccattggagcagcttgtggactttcatggccgcccgatcgtcttgttatacaagtacttgatgattcaaccgactctgcaatcaaggttaattaccgggccatcttttcttaatggtcaaattatggttccggtccctctattatgctcaaatccctataatataatatcatcagttctggttaaaatgcggatgtgttttttcccggaaacacaattccaagtcgaggataaaatggttatattccatttttagacctttagtatttcaatttaaccttcttagcataaaattgttaagtttgcccgcgtcaactagccaggggaacaataaaaaagttcttgcattatcctcaatttgttagccaacacctaa

SEQ ID NO: 13976 - DNA, 588 bp, Gossypium hirsutum
  misc_feature (288)..(288): n is a, c, g, or t
tgctgtgaaagcaattagaagttagctatgcaatatgattttttttactgtactatatatatatatttgtaataattaaatctttaatctagataaaagataaatctaactttcgcttagcttagcttagtatattctttttcctcttaaattgtcatactgaataatgggcatggatggagaactgagatgtttttgtgtcaagtttgtatgattgcaatatgtatttgagttcaaaagagaagttccgaaaggacgaatatcgaacatgtttcgctttacggaacngagtgttagcctaactcgaagcaatgtatataaaagatgagtatagccaaaatgtaatgttgagatggatgtattgaaatgctaggaagggtagagttagaaatgagcttacttgattccgagttaggtcgagagaaaactatttatggtgatttggctatgtaggatgtatatcaagggatgcgtgcattagttggatgtgaaataagtagaactcgaagagaggatggtggctgtagccgaccccaactatattgggattaaagatagtcggttcaaaaactgtcaccatcgtatttg

SEQ ID NO: 13977 - DNA, 560 bp, Gossypium hirsutum
tgactaggtggagatagcttgtgggaactgacatggctgcatgtgaataacattgcgccatctttgcagtcggaggttttccctgatcagggtccagagctcaagcatggcgaaactggttgtgcagtttccggtgaaacagtttctgttccttcaaatgaaacaatcacccttgaaggggctggtgcgggaagttaaatgttgtgtaaagttggatgcctgaaaagggtttgtgattgccagcatatagagtcacacacaatacgttgctatttctcgaggttatccgcattgagacattaggacacattaggttatgcagccgctgagattccgcaaatcctagtatcgtttggaggtattgggtgcaaattggtaaaaaaattagagtgagccttccttagaaatgtggataagatttttcagttataattacctgttattccagatctggcttggtcttccatctcattgctgcctccatggaaccttgccaaaatgttgtgttaaaaattacttagttcttagtctttgcatatggtgtttttttggcttttttt

SEQ ID NO: 13978 - DNA, 608 bp, Gossypium hirsutum
tcctctttgatttcatgctgtaggtgctgttatgtacataaagaaagagtttaaatgggagagtgaaccagcaatagaaggcctgattgtagcaatgtctctcattggagctacctgcattactacatgttcaggaagcttgtcagactggctaggccgccgtcccatcctaattatttcatccctcctttattgtcttagtggtattgtaatgttatgggctcctaatgttcccaccttacttttggcaagacttttggatggattagggattggattggctgtaactctgatcccgatttatatatccgagacagcaccaccagaaataaggggattcttgaatacccttccgctgttttctggttgccttgggatgtttctttcatattgcatggtttttggaatgtcgttaacgacattaccaaattggagattgatgcttggagttctttctattccttccctcgtatacttagcattaactgtattcttcttgcctgaatcaccaagatggctagtaagtaaaggtcgaatgagcgaagcaaggaaggttttgcaaaggatacgcggcagggaagatgtttctgggtagttggattgaatta

SEQ ID NO: 13979 - DNA, 392 bp, Gossypium hirsutum
ttaaaaccagctaagtttaagtgtgaaatgggttcataagcatatatcaactagtgataaaagtgaataatttcttaccgatatttttcaccttgaattatgttatttatgttcttatttatattgtttacatttatattttatttattattaatttagaaaataattggaaaaaaaatgagcttaaataaaatcaaagataaatttttacatattcgactttcaacacaatgcagcttcaatattttggctataacttgaattacaaacttttttttgagcccataatatattaattcaaagagaattgaaagatctaactaaaattatttcataactcaagcccaaaaacatcaagaaggtgtccaaaaatggtggaagtttgacacgaa

SEQ ID NO: 13980 - DNA, 643 bp, Gossypium hirsutum
ggaggtacgttgtgtgccggtcgatcagaacccaacgactagtgtctgtttttcaacgctatttgcatacctattttttgggtcaacatcgatataggtgtgggacttggttacgacaggtttggttatcttgtgggtaatctgttatcttgttgaatttttcagcaattatgtctgacaaaaagactggaattgtttctgatatagttccggttgaaatttgcagcaatcttgtgggtaataacggaacataaattaaatggaattaattttcttgattggaaccatactattgaattatatttgctcagtatttctatggatagtcatatgactgataatccacctacggatgactctagattgttttgggtgagagaagatgcttgcttgtatatacaaatttgtaattctattgacattgagttggttggtctggttactcattgtaacacagtgaaacaattaatgaactatttgcagttcttatattctggaaaaggaaatatctcttgtatctatgatgtttggaagaatttttacagggcagataaaagagagatctctcaccatttattttatggacttcaagaaaacatatgaagagctcaatatgctgcttcctttcagtaccgatgtaaaa

SEQ ID NO: 13981 - DNA, 490 bp, Gossypium hirsutum
  misc_feature (290)..(290): n is a, c, g, or t
  misc_feature (294)..(294): n is a, c, g, or t
  misc_feature (299)..(299): n is a, c, g, or t
  misc_feature (301)..(301): n is a, c, g, or t
  misc_feature (320)..(320): n is a, c, g, or t
  misc_feature (336)..(336): n is a, c, g, or t
  misc_feature (339)..(339): n is a, c, g, or t
  misc_feature (351)..(351): n is a, c, g, or t
  misc_feature (354)..(354): n is a, c, g, or t
  misc_feature (363)..(363): n is a, c, g, or t
  misc_feature (384)..(384): n is a, c, g, or t
  misc_feature (387)..(387): n is a, c, g, or t
  misc_feature (448)..(448): n is a, c, g, or t
  misc_feature (450)..(450): n is a, c, g, or t
  misc_feature (454)..(454): n is a, c, g, or t
ctatccttactggtttgcatgtgcagaactttctcatttcaatggctgagaaacagtccacctaaacagctaaactttgagttgtaaaacaagtaaattgactggatatgaactagagaggaacaggcatgttttgtaagggcagcgagatccgtatcttggaccccatggcttaaaaggggaccagattatgtcaattttcttcaagttaccaactttccagtacaatcagaacacattatcttatcatttgaagaaaccccaatttttttttttttctccctttgaancccntttcncnctagaaccaaaaaattatntttgcaaaaggattangcngcagaatttctngcnttcttttgnggggggaccccggaccaaacntgnaaaattattgtcccttatcatgatgatttccaacaaaatttaattactaatcctagtatcnanagantaatttggtttatcaaattaggcagggccccctatc

SEQ ID NO: 13982 - DNA, 650 bp, Gossypium hirsutum
tgagagagatgtctcaccacatgattgcttatatatgccgcatgcatcatggctgattttcgaagatgagaaacatcggaagttgcttgtattttggagtcaattcttgccagctcaatgttaacttcactgcagcgctgctcaagcaatgccagtgtagctggggcagcttctttgtatctcttttgtagttctgattccaaatactccctcaaagaacaaaaaccaatatagggcttgaacttttcttcatcataacctcccttgattccatcatgcaaatgacgtaaaacttcagcatccacttgggatatttgccttcggaattcatcatttgatatggtgttcctttccttcggcaatgccacaaaaaatggccgggtattttctccaagatatccacttgcattcaaataacgatctacttcccatctgtcactaaactcctacattaattgaatcgtcacaatcaaatgccacacaatttcagatacacaatcaagttacaagacagagacatatcatatcaagcaacaagcaaggcttattttcagtccctattatgtcaggaccccaatgctcaatttctccttaaacagagcccccgggctcaggttttcattaaaccaagtccagttcgttaaatcctc

SEQ ID NO: 13983 - DNA, 406 bp, Gossypium hirsutum
tccggtaccacattgactacgaaattaatacaattcataatcattaatacattactaattcatatcttgagttacagaattctaaattaagatccgctaatttttcctgaaactagactcacaaatcttcttacaataaaattttcagaatttttggtttagccattaagtacagtttattctttaaattcacccctattctgctgtctgacagtttcgtcccttcttcactaaaaattaattatctcacagtacagaactcggataatattcttgttgatttctcctgaaaatagactcattagggattctaaacatataactttaagcctctaattatttttcttcaatttttggtgattttccaaagtcagaacaggggaaccggaatcattctgaccatgta

SEQ ID NO: 13984 - DNA, 539 bp, Gossypium hirsutum
aaaacacaccctttcgctgtttcccctctactaagttgacttttttttatttaacgtatttttagtgaattatgtgatgttttatgttaaataatttatttaattgttaatggttttaattatttatatttaacatttgataaatttttattattgatagtgattaaatacaatttcttattttagttttttcgtatttgaatcatgaaattattattatactatcgacagatgcatgaatgcataatgattttaaagtgtgcacacttcttatatgcatctccatcattgagtgccattatagttaggggtgaaggaggggtcatagccccttgaatgggaaagtatgctttaaatctctcaaaatttataaaaatgttagttaatgcatagtaaaattttaatttagctttcaaaataataaaattttcatttagccttcctaaaaattataaaaaatatatgccaatataatagtaaaattgtatttttactcttataaaaatatataatttaatcgtgcctaaaaaaaaaaaaaa

SEQ ID NO: 13985 - DNA, 599 bp, Gossypium hirsutum
  misc_feature (56)..(57): n is a, c, g, or t
  misc_feature (582)..(582): n is a, c, g, or t
attaactgtaaccgaaaagcgaatagcaaacatttgtatcccaaagaacgtaggcnnctttttctcccttgcaatgatcctttaaataatagcgaagaggaagcaaaatgccaagaacaggtacgtatactaatatattcaaacattaatcatattcattaatcgtgttttaagtaatggattagtggggtttatgtttggtttttggaacagggaaaggtatcattgttgtcaagacaaggtgtgagggaacttcaatacttgatgtttactctggctttcttccattgtttgtcttgcgtccttacattcagtcttggaatggcaaaggtaacattttcaatttttttcaattatttatatttttgataaattatcaaaaattaaatttatttagtttagttaatatttacttccttttttgccatcaattaacatttattatttaaaaaatgtcatttatttttttaacaaagttaatatctttaaagtttttatgattctacaaatgaaaaaaaaaatatttttcatataattttttaaagggataaatattcaaaaactacacatgatctttgattnaatgtgcaatgtttata

SEQ ID NO: 13986 - DNA, 557 bp, Gossypium hirsutum
gtttgttcccaaggatgtatgaaccttttgatatggacttgtttatgagccatttccatgtaccttcaaattattatttaatgcaggcaaatgacacagttctcattacaagctgcccaagttaatttaacattgtctcaaggtttcaaacaccagatctcaaacttgaaagtgattgcatatgaagtatgtctttcgctgcaatcagggtatttgaaagagatgtcttttgatgatgatggaattcgattggttcaaattggggtttgaattcgagtagatcggattggttttttggattcgggtcagatagtcatatgataaaatttctgggtctacacgattactgtgttagtgttcaatatatttgtctgtatctgaatgaaggtaagaaaggtataaagtaactattgcatttatcctataacatcttaaagtgaattttttaaatgaaccgaagttaaaaaatggataaagatgtaatggtttaaagtccataaaatgccttattttaattcaagttcatctattcccctcttcacctttcttccagtata

SEQ ID NO: 13987 - DNA, 471 bp, Gossypium hirsutum
aaccctgtgattgacctcccctacttataatttgtttaaaaacatgccataaataatacatgaaaatgcaagggcattttgtacaacaaaatcctctgaaattggccctaaaattcaccaaaatcacacttatatccaccattcaacaccaaaaatcagtggcactcgcgggtacactgttatttttattcccaaatttcctctgctcttggctcttttctcaaacccccaaaagaaccctcccttcttttcttgtggattttgacccttccattttggaattcaaaatacaggtcagttcactttctctgcttctcccctttgtcaatagttcaattttacctctctttttcttttttctttctctaagtaaaattttgactaattcaagtagcatttttcggagtttttcttctttggagtctatttatgtttgcttatgggtcttacggaatctgtttttttcttttg

SEQ ID NO: 13988 - DNA, 670 bp, Gossypium hirsutum
gggtttcttaaattctaatggaatataagaaaaaacctgattgagacctgtttacttgttatagtccaaagccaatggattggtccattcagtcactaaatgaccttgtagtttcagcaaatgcttgtttatgctgataaacctacttccagagtttttaaaagaattaccaagaaacaaaccattatttgcaactagttgctttccattgaattccttgtttgctagtttggatttactctctttatttgtgactttcaggtttcccgtctcaatcatgaagtagatttgttagaatgaagctgcccttaactgccgttctatttgggaatggcatccgttttaaggcattcataacggattcatagctctctttttcaatttcaaaacacatcactgaataatttctagactcttcaactttttataggtaattgattaaaaatttaaaaaaaaatatgtagtgaaaactttaagagttatcctgaatcatgttgatatgaagttatgcaatgaataaataaatgccaactatgagagcagaattttttctttactttggggatggaaggttgaatactccacaagtcatggataaaaattaaaacgagtggatgcttcagatcggtttaccatgatttcaattcccacttggtaacctttgactgat

SEQ ID NO: 13989 - DNA, 654 bp, Gossypium hirsutum
gtgatgtggaaagaagagatgatgaattggataaatgattgtgggtggagtgtggataaggtgagattgcctcactcctattggcaaaccttagtcttcatgttgtgtttttcggtgtaactaaagtttgtgtggcaagctttaattttgggtccactttggaatctaaaatttgtggtttatatatctctacctcgcagggtagtcagggcagataagggttgaaaacttgaaattgggacttttgccttttgccttttgccttttgcatagtgttttgctgtacttattgtttatcacgtaaaaagttattagcttatacagaccctttatttcaaattgtctctcttgcaaatgttgcatgaaaatcttctacacaaggatccaagtttccatggtagaacttgtacgtgaattaagataggtgacactagagtgtggaacagccattttgtccattatttgacaatttgtatataagagttcctccatcatgaatatgaaagtttgatgatggaattggtgcaaagtgacacatggtaatctaaaaccatgactcaaatcagattaaaccccatattttaacgtacactactaataatacaaccccaaatctaatttatcaaataagactaaaccaagagtaagtgtcac

SEQ ID NO: 13990 - DNA, 588 bp, Gossypium hirsutum
  misc_feature (377)..(377): n is a, c, g, or t
  misc_feature (392)..(392): n is a, c, g, or t
  misc_feature (502)..(503): n is a, c, g, or t
  misc_feature (505)..(506): n is a, c, g, or t
  misc_feature (508)..(509): n is a, c, g, or t
  misc_feature (512)..(512): n is a, c, g, or t
  misc_feature (538)..(538): n is a, c, g, or t
  misc_feature (548)..(548): n is a, c, g, or t
tctttggagcaacatgggctttagctaattgccattgccagcacgtagtggcatcaacgggaggcgtaatcacttgtttcgaaggcttaaatgggttggtagacggtaggctaagttcaatcgctattggcttcaaagttcccatttgagtcaagaagaaaatcgttcgagttgcataagcttttcgatcggggtgagcatttatactgttgagaaacggaaggaaagcatcatgataatccaatgtaaacagctttttcctttcaattgcctggaaaaaaaaaaaaaaaacatactcatcaataattaaaaaaaaggaaaaaatttttttttatggaactgttttaattttttttaaatttgaaaacccaggggcncaaaaagcaaggganaacaatttttaattgatagggacccgttaaggtgcccatgtgggtttccccaaaaaaatttgttaaaaaaagatttttgtatttgaaaaaacaaggggatttatttggannanntnnacnggttttttttttttaaccatgggttngtttgaaagntaaaaaaaaaaaaaaatttttactctttgaaaaaaaggcc

SEQ ID NO: 13991 - DNA, 566 bp, Gossypium hirsutum
tttactcaggtgcaaagtcgagaaaagtgtaaatcgaaatttattcagaactggccttctttagtgaatggtttaatatgaaatttgtgacggcagaactagttggggaaatgatatttgaaatgtgaactatctgagtgtgacagttatgactggacagatttagcagtctcttttgagatgttctatgtgtttacccgttctcagaaatatttctatggctattgatcttctgaagaaattcttgttatatgggaatgtcttctaattctggtgttggatgaaagcattggtagtctgactggtttataatttatattgctctatttcatcgggtattctatttcatttcgtctgataagaattgatgagagaatacatatgatattatgattctgtttcttctacttgatgcttcatctgatatatatgtatgggaagatatattgatcttgttatatttgatttcagtgggattaaatgatgttttcttctggactttctttctttgaagaattatcggggtattctgtattttctctatgagtttgggtttcgattctcca

SEQ ID NO: 13992 - DNA, 380 bp, Gossypium hirsutum
aaaatgcttcatatccagtaacgacaatacaagcatacccagataaaaagatgaatgttggaaaaatatcggttcattgacccattttaccgaactgatagagagcaagtgttcagatagatactgccactcaaaatcgaaacttttacatgctcaaacgaaaaagtaccttcttcgttgaaaaaccaagaacttctaaggaatccataaattgaaaaggtttaaactttcttcaaagttaagcttctgttatttgcaattctcctcttcctcacatcaaaatgaccaaattttataagtatgtacattgttgaaatgattgggcaaaaaacccctattcaaatgggccatgaatctcagaccatacagggcttcacatt

SEQ ID NO: 13993 - DNA, 679 bp, Gossypium hirsutum
gcaaatacacgggcatatccatattaaaacttgcaatatcctctgataaatactaataaattctgaatagaattacacttatatgtgcatggaaaataattatcttttgcaagaaaaaggatctaactttttattttaaattacactaatattttatttacacaattaagattatattaattaaacattaaaagcatattataaaattgtctaaaattctaattctcctcgaaaagtaagatgtagtatcattctacttgaaaaggtgttatgataactttttatcgacattacatgatagatggaaagtaatgtgctcacgggtcatttgccttagtggtataaataatttaattactatttaatagtaattatttttcattaagaaagatgtaataactactattatataaaataggataatattgagagaacaattttattccaaatagatttaatgatattctttatttctacgagggtaacacacttgtgacaatatcattagacggactcttattgagtaactttcgtaaaagtatataataagggagagatcaatcatgactaaataatgttgtaattaacaagggaagagccggagccggaagttaattaccaattatttgagccccttacgtatatatatccaatcggttcctctgctagctttagataa

SEQ ID NO: 13994 - DNA, 610 bp, Gossypium hirsutum
tgctaattgggagatgggaaaacgtgcttatgcagcattcggggagttatgtgttgtggagagaattcttgcatgttgttcaaggggagttctccagatttaaagtttcagatatgagaaaaatgtatgcacatgcgatccaagctctgtctgctgcctgcaataagcagtttagacaggttcttaatttagtgcattttagttttatttatttatttatttattacttgggtttctctggtattactggtgatagatattttctttctcatgcatttttcatttaaactagtcaagtaatgcctggtgcacgtatgttgtgaagttatgtgaacatatgtttattactgcattgcatttatggtgtcaaagtttgctgttttattagtatgattatgactccatcatgtcttctgaactgataacgccagtagatgattaattcagtacaaaataattggacattatttggttctatctatttatactgatatgtttaagcataattgataagttgacgtctgggagtttttatctttgaacttattaataaccttaattttgtagaaattacagagggaataactggtttgtacttggatatgaaggc

SEQ ID NO: 13995 - DNA, 653 bp, Gossypium hirsutum
cacgtccgacaagtaaaagagaatgttcgaaagttggacaaaaccgacttttcgtattggaaggatattaaaaataataatggagtgctcgtatcaattccttcttcttcttttttttctggggaaagcgaaaacggaagtctcgctggaaatttattgctaagataaataattgatatctcccttttgaattatttcatataccaaaaataccctcaacattatgtccatattacgcggtcttgtccatttaatagcgcgaataaacttgatggataaacttgtccgaatgaaaatatcgggtccaataggaatgcgagaatcagtttccactaattataagccatccgtttcgagaataggaaaattagaaaaagaaaaaaagaaagaaacgtaattgaattcattaccctcggatttgacccgacccggatcactttcaacccgaactcggaaaatcgccccccgagttcgacgaaaactcagccaagttagaaccgtcgagaccttataacgcaaatataatttgatttgaagaacataaaaaatccatgaaagaagaaaacacttactgaaaaacaagagttgttagggttaagagaagaagaagttgaggatttcttgttatgttctttgtcttcgtccctcctctc

SEQ ID NO: 13996 - DNA, 622 bp, Gossypium hirsutum
tcttccaaatgattgaggataggccaatggattgaaaattaaaataggttaaagattgcgtagtgtaatgttttggagttaagttcaggtttaagaatccaaaaacaaaatctacatgcaaacatacacgtaatcataaaatgattagtaaattcaaatgaaaatcactatacttaccttaccttgatatgagcatgtcaaacatatatcttaacaaagttatacgttaaactagaataaaagcatggcaatgttaaaagcattcaaaattgtattaaacatataaagaaattctctacacaacaagttttagcataatcattttcattccacgtctcaagattcaaaacacatctctcaattaaactaagtatgttattataatcacacaaattataatcacatattgatttcattagtatgttattatcagaattacggatttcacacttagtgtaaccttagtaaaacaagactttgacacacacattttcactaaaatatatcaaagaaaacattagcattataagtgcaactatccaaacatcgagagagttttcaaaaagatagtatatacactttgtttgcataatatgtccaaccaagggattacacatcagaa

SEQ ID NO: 13997 - DNA, 590 bp, Gossypium hirsutum
  misc_feature (549)..(549): n is a, c, g, or t
  misc_feature (553)..(553): n is a, c, g, or t
tttttgattcgctcctttccaaggagaaaaatgtgctttaagccctgtatttttcatacatttgagatttaatcccctacttttcaattttaaaaatgcaagttgagttgttaacgtgttaaaaattttatataaaattctgatttgttacaacattatttatttacatggatatcaagtgatcgcttttttttttcaatttcaaaaggttacactaataaatttgaatgaagaactttaatgtgatattaacaattggatctgaattttgaagtctaaaatgtatagagactaaattctaaatttacgaagagaatagaaacttgaaccaaaatttaacctttattttgttcaagttggagatgttgatttgatgtattctaagtataccaacttatattgacaataaattttatttttgatattaaaattttaattgcaataactattcaaactaattaatgaaattatataatgattatattatgccaatcaaggatggttggactagtcgggagagcttgactgttatttcagaaattatcgcanaatnccggggctcctttgcacgtgacaatatgtagtcactc

SEQ ID NO: 13998 - DNA, 605 bp, Gossypium hirsutum
tggcagcactttctcttctattttacatctgctttgttcagggattgggtttcaggtccttttcctccctgttgcttttgcaagtcttggatggtgagtttttgcaactcattttgttattactttttatcccactctcttcaaatcaccactctcaaacaatccaacaaaaaaaatgggcctagtctgtcttgttttgctcaactcaaatatggcaatatttgttgatcacaaagctgacctgtttccaaaatttccgagtttcagtgtggggtctttaggggggaccatctaaagaagaaagagtctcttttccatgttctaaatactaattaatacaataacttaatctccaaagacccaaaagaattgttgaaagaaagaaaattgtccttctgtttgaacctagacttcaaataattccagctttatttccaacaaccattgttggtatggcccattttttcttcttttgtcttcctttttgaacccccccaaaaaaaaagttaaaaaaaaaattggaaaccaaaggttttctttttctttgttttccaggggcaatggttaaattttttccaaacaattttaaattggggaagggaagg

SEQ ID NO: 13999 - DNA, 571 bp, Gossypium hirsutum
ggaagaagctgaagctgaagctgcggctgccaagaaggttgtagagcaaagtcaggatggtggtggggtatgcagtgaaaattgtttggcagagaaggcttcagagtgagccaaattccagatcgatttttagtggattacagattcgtgggcgtgattgttagaagggattctattttagctgttaaaagcaaatggtttgtcagcacatcagattggaatttattagtgttaataataacataagctgttttatttaacaaaacttgaacatgctatgggtgttccttgactgtaggaaaacaagatgcatacttacatacatacatcaatggcagaaaatttgaagtactaaatgatcaaaaggaaattaatgcattcacacatacatatcaatgggtcctggactatgtctatgttataggaacaacgcatggatagtgcaaattgaggttactggactatgtctatgttataggaacaatgcatggatagtgcaaattgaggttactggactatgtctatgttataggaacaatgcatggatagtgcaaattgaggttactggact

SEQ ID NO: 14000 - DNA, 620 bp, Gossypium hirsutum
aaatggtaaattaatatctatacatttcggaacgtgtaaattaattccccattaaattttatttattaaatgatatatgaaatattaatttaaatggttgattcctaattcttttcttattgtaaaaaatttaaaaaatcaaaattaattctcatgcttgattgaaatcataaataaataaataaaaacttgattgaacctaagaaaaattaactaaaaattttgatttctcactctcaaatttctcatacttttgtaaatgttcatttaatcttcatcgcttatacttccagctaaaaggtataaaaaattttatttaatgtttacttttttctattttagtgaatgctcatttttacatctcttatgctttcatatctacttttgattactcattttcacatccccttaaatattacaaattttcctatttgaaaatcttatttttttaataccctagaagctttaattttaagttactgagttttaaatttttaatataaatgtatggattttgaacaatttgaaatttttgaaaataaaatataaaaagtgaaattttaatttaaaataaaattccattgcgataaatatgtctccaaaggtggagaaggagtgaa

SEQ ID NO: 14001 - DNA, 368 bp, Gossypium hirsutum
ttttaagccacgtcatgtgcaattcgatgttttcttcggctttcgatggcggcaagagcagataagaaacgggcaatgcttacacttaccccccatgaagaacatgaacatcgtctttttcagaatttggccatatatcaagttctatcactctcacacctctcttaagtgcgtttatgatggggacgtcgctgcaatcgctgttgagttgattcccggtaaggtaagaattgtgaccggtaaatatgaaataatgagacaaaggagcattcatatcatggtgtacctgaaaaccaaaggaaatgaacatgacataaacaacaatagcacaagtgtagataaaagtaccatgaagagtcagattgcaa

SEQ ID NO: 14002 - DNA, 657 bp, Gossypium hirsutum
  misc_feature (651)..(653): n is a, c, g, or t
tctgacaatcgaggattgctctttaaaccaaataaaaataagaactcattattgggaattcaacacgttgtgtcctaacgtattggatgtgacaaattgatttctcgaaatgaagattttttctaaaaaataataaaggaaatatttcgagtttgggattttaaaggaattgtgccctaacgtattgagccgcgatttcttaaatcttggataaatggatattcttttaattttttttcattatacgagtattctaacctaattcattttggaggaaattagaatgttgtgcgctctaacgcattgggtgtggcatttttcttctctgaaatgagaagggtcttaatacgtaacgttttaagtttttaaagatcatatttttaaattttcgaccttaagacactaattaattaattagttaccaattttgggctttacgagggtgctaatctttcctcgtacgtaactgattcccaaacccgtttttctaaaattcgtagaccaaaatcattttaggtgatccaatcacaccttaataaaagattggtggcgactcctaattttcatttttaaagtcaataacctagaatttttgtttaaaaaaaaaggtttcgacaaaaggaaaaaaaaatcaattgataactgaggaannnaggc

SEQ ID NO: 14003 - DNA, 1168 bp, Gossypium hirsutum
  misc_feature (1149)..(1151): n is a, c, g, or t
  misc_feature (1153)..(1153): n is a, c, g, or t
  misc_feature (1161)..(1161): n is a, c, g, or t
tgagcatagttgtgcccaaaaaaaacgtatgacctgggaaaaaaataaaaaataaaaatatggacaagtagaaattgaataaattgaaattacaattgtaaaaaaaacggagttgagggaagggatttttcgatttgaggaactctagcttccgattattttgatcctccttggaatcaatcataggtttttaggtggtccttctcatggccgaataagctagttgtactggaagaggatgcctacgaccaccagctccacttagggttttagcctttagtggctcatgtttttcgaaaaaaaacacaaatttaatggaatgaaattttactagaaaataaaaggaacaaaaagctaagaactttagggggaaggagttttttacagaaatgatgagtgacttttcatgtcactccatcccctatttatagtacataaaaaacttaatttgttcctatttaaactctagaagataaattggaaagtagggtcaaatcctcagagactggatttgcacaaatcctcgtgatcccgagcacagttgtgcccaagaaaaagcagagtcttatgtttgtaaatatcttctttgaatttttgcctcaagtctttcacattttgtatttttggcaccacttctttccctattcacatagagggaagggatttttcgatttgaggaactctagcttccgattattttgatcctccttggaatcaatcataggtttttaggtggtccttctcatggccgaataagctagttgtactggaagaggatgcctacgaccaccagctccacttagggttttagcctttagtggctcatgtttttcgaaaaaaaacacaaatttaatggaatgaaattttactagaaaataaaaggaacaaaaagctaagaactttagggggaaggagttttttacagaaatgatgagtgacttttcatgtcactccatcccctatttatagtacataaaaaacttaatttgttcctatttaaactctagaagataaataaatatataatttgaaattaaatctaaacaatatcataataatcctaaaaataaaattcaaatttaaataaagtcttatgttcataaatctcttctttgaatttttaccctaaatctttcacactttgtattnnngncaccactnctttccc

SEQ ID NO: 14004 - DNA, 677 bp, Gossypium hirsutum
atcgttaagtggcatgtgtggccggttgtttgtttatggttttctattggttgcaatgttagtttgtcaattagaaaatcgttcagatggggaaatgagcattcaattcctacaatgatagaccaacactgccactggcagcaccactagtttttctattgaccatgcaatctgccaaagtcatatctaagtgtattagtctattatttctttgcgaactcgtgtatctttttcttttttagatctttattagttaagggtttaggttttctccttcttttagaaacctcccatgcttttggcttcatgatattcatctgttgagaatccttggggtttcctcactgtttgctgtagggtcaaatcgataacaaaatgataagaattgtgtggaactttttaggctttgcttggtagagtgaaaagaaaattagaaacatgaaaaattgaaagatgaattttttttttctttctattggtgtgcttggaatgaaagatgaaatttgctggtggagttgataaacaagagggaatttttatttttattttaaaaaatgcataattttgaactaacttacatatctctctcatcttttcttttcaatttggaatgatttgtttttatgcattaaggtgaaaaatgatcatctcccttattttctttcttaccaagcgcg

SEQ ID NO: 14005 - DNA, 630 bp, Gossypium hirsutum
agtgaaaggttgttgagaagaggcgctttgggcggcggcggtggtggtggtagaggaatggaaggcaaaaaggaggaaaggaacttggaaagagagagccaagtagccattgttacggattggtggagtgtttgtggatgggaattctattggctttgctttgattgttttatcatacatcaacataagaagattaatttgggatcattttggattactatgtcatccaaattgttttggttcagccatctgggtctcaaattattaaagcaggaggcttgatatagatgaggtttgcaagttactttaccatatccccatttaacaaatatatacattcgccacttttttcatgcgactgtaatgttagaagctacaaaattactttaactcggttgatattcagtacaagggatgggaattcaagtttataattttatttaaaagttgataatgatatgcgagtaattataagtattgtataaaaataaattacacttatatattaagagaggaatataaggggagtaagttggtcgggacgaaaagttagaggttatgaagagagagaagtacagaggggagcaaagtggttgaggttgattcacccgttaggatgaagagtcaaag

SEQ ID NO: 14006 - DNA, 361 bp, Gossypium hirsutum
ttttttaatgcagaaaagcctataaaaagagatcaatagtggctaaaacagcctagcagcctcaagaagtctccatgtttcttatcctcagcttcaattgctcagtccaaaataccaaccgtcgtggcactgggaaataggaaaaagaaaatgaattacataaaagcatacattaagtttttaaattgtgagttgggactgttattgttatccatttgcacccttgcattgtcactgtcatgcgaaatatataagattctagaaacagacttaaaagttctcagtatcaagaatcaatacaagtaaaattttatgtttataagagaattcatcaggacatcctgtggaagtgaaatcaatc

SEQ ID NO: 14007 - DNA, 744 bp, Gossypium hirsutum
  misc_feature (666)..(667): n is a, c, g, or t
actcatatcaccaaaggaagagggaatgctaccgttgaaatcattctttgacatgtttagagacgacatactcatatcaccaaaggaagagggaatgctaccgttgaaatcattctttgacatgtttagagacgacaaggatggtagatgtgctccgatttctgttggaatgtttccactaaagaaattgttggagatatctaaatcctctaaaaccaaatgcgaggggaatggtacttggaaaggtccggacaaagagcaattgaccagatgtagtctctttaagttggtattgttttccaacaaccaaaatggaaattgatttaccttgaaatgtatgtgtgagagagtaacatccaccaagtcatgttgatgatagaggaattgaggaaatgatccaccatttccacaacatgataaactaatctctcttaactgaaatcttggggccacggaatgcatctcatcaacgtatatgatgttgttgcttgcactcaagtactggagctttgaaaggttgaacaagtaccctaatgagcttgggatttgaagcttattgtatgaaaggtccaaccattggagggatgccaaacttttaagggcagatatatttccagacaagtcattgaaagagaggtctaatctttcaagagatgcaaagttgtnnaagcacaacatatttccagacaagtcattgaaagagaggtctaatttttcaagagatgtaaggttggagaagcacaa

SEQ ID NO: 14008 - DNA, 411 bp, Gossypium hirsutum
tacctgtatttttataacttttctaatcttttgcatcactacattttgacccttcttaataattaactacctttttttttaatatctaaaatcaatatttccaagaatattttactttcccataatgataggtttctaagaatttgacgttccacccctctctatattttacccttgcaataaggatcaaattgcaaatcaaaatttatttgaaaaataaaattcaaggtatgagctttttgtttttcttcagttaaattttgattaatcttacatatatatatatatatataatgatttgtgatctcatgcagtctaaatggaaccaaaatgtgcataaaaacccgagggtatgtgctacaattggcaacatattcaaatgaatttccctgaatgcatacacttgtctcc

SEQ ID NO: 14009 - DNA, 400 bp, Gossypium hirsutum
aagcttagtgagtgtcatgctccgtggagttcctttcttgaagagtttaaaggcaacaaactatgcattctaaaggggtctttgcgagagaaaattatcaaagaactccattggatggtttgggagggcatttaactagagataaaaccatagaaatggtggcaaatcagcattattggcccaagatgtttaaggaagttggcatattaatgaggcgttcaacttttcaatttagcaacgacagctcacaaaatatgaggttatataccccattgcctgaatcagaaacatcataaatccatttgaacatggatttgttctcaggtcttccaaagacctcaaagaggcatgactccatttttcttgtggtagatcaattttcagagagggcacacttcat

SEQ ID NO: 14010 - DNA, 643 bp, Gossypium hirsutum
gatcaaacgtacaagaactaatttgccaatttttttagcaaagggtgcaaaatgcaatctgattactagtacaatggcctccatatacttctaccaaaatcacggatagaaaaaataagctatatataatcatgtaaagtggaagagtctgctaaaaagccaattcagttcaacaacattaaccaatgaatgcgactgcagaacatttttttacaaacatatattcttaatggtacatacttttttttcaggttgcaataagggaaaataaatgaaaaataaaatgtaaatgttaagacagccaaatccgcagaagaaaacaaagtttgtggtttcaccttcattgtcaagccatatacttcttttcacttgtcttgcttcggaacggtgataacaatgaaaatgtacgagaagctgcatggttattatatgtaaagtacttcagatactccaccttagtggtgtaaaatactgtcatatttgtgaacgttggggaagagtacaaataaaagggcaatgagagcagcaaatgcttacacttttgtggagtattatcggctgtcggggtttcatcctgagagattaggttcttcaacgattgaactgataagaaccataaaattagtcagctttggcaccaaat

SEQ ID NO: 14011 - DNA, 577 bp, Gossypium hirsutum
  misc_feature (60)..(61): n is a, c, g, or t
ttatacttcaaatttcgagctgcaagaagatggtatgttctcaatgtaaaggctaacttnngaggagttaaattaatttacactagctttcgataatttacattcattttcacgaacctgaggtgggcagattccgacataggaagagaaacatggtcacccaagacatgaaaacaaatgtacaactaattccctattcttgccattccatggaaccatactcgaccagaaaatgtggccttcgagtcctttgacttgatttccttcttttgcaaacccaacatagaaaaggagaaatgctgcaacatatacaactcaaatattcactgtctgattcaaaataaagatacttgaactgctaaaagaatattgtacttacatcaagcatggttcaaatttcttgactccaattatcagaaatcatacaatcggaacccatcccagtatccaaagtggtatgcttcttttcagagaaaggaagaagcttcccggagtccaagctccttagatccaactacttggctgcaataaatagaggattccgttacaaatatataaaacatagaaaatcaaaaca

SEQ ID NO: 14012 - DNA, 652 bp, Gossypium hirsutum
cacttacagcaaacaggaaagaaacattgcatcaatattttagcactatacttaaaacatgtccacaatatacgtatgcttaagttaagacagttcaagctcgaagtttgtggttgcacctcccaacaatattatctccaaggtttgaacatgcattcttccattgaaagtacaatgtgtactatcactatatccaacacttgttgattcaaggattctaatgtttatcattattttctcgttactttataattccatccatcatccttcgttataatgtttccttagaatactaactcgaatacttttttttataccccagtaggaccatttgtgtgaacccctcaaaaactctccatgacaactctttgtaacggcttgtacgatgagcaagcacactcattagtcagtaccgcaggagactgcgacgttagaataagataacctaagacacagacatgatcacatgggacataccacaacgccaaacaacctatgttggcagtgaatgtttggtcactgacctctaacccctaacttctaatctgccaatacaacccgtcacgtggcactatgagataaaaatgatccactatataagcatgagagcacaagggaaaaggggatccattcggccatctctacgtttcta

SEQ ID NO: 14013 - DNA, 685 bp, Gossypium hirsutum
cttccatatgcttaagaatggaagatggcaaaatattcttgttaagggtatgataatattaaccttgtgcactttctcaaaggttaagttgggaaattcaacgtttaatctgtttaacgaatgaggtctccccaagaaacacacacaccccaaggtatgtttgaaatgcaaactgcggctaacagttcaactttaacaaaatatattattaataatttggtctaatttgaattgaatccccatactttataagaattaaaaaattagtccttttactttaatttatcaaaatttgatcctcatactttacaaaagtttgagaagcacttagtccacatgtttgtaaacacacaaacttaaaccgttggcttttactaatttattgaactaccaattttcttccatacaaattacacataagctcaacgccacgagatagatctataatttcactggtgactatagatttcactttcatccttcatttggagaataagaaaagcagtttttgcccttgaattatggatcaatcaattcaattagttgttaggaccacattaaaaataaattatggcataatatttaataatctgattcaggtataacatgacggaacaacaaatttccctctctttttttttcttatatgttaatttctcaaacttgagttatgaccgaaatgatt

SEQ ID NO: 14014 - DNA, 645 bp, Gossypium hirsutum
taagccccttgattccaccacaggcactgtgtccaatcaccacaatttcttgtacctgtataaaagatattaacactttcatttgcatgagattgctaagaataaagtacggatggtgcagtaatcaaaccgagtcgaagtcaaataatgactgagttcgggttcgctcgagcttagcttgaaataaaattgaagtactcaaactttgctctattaaagttatttacatgatttaaatactcaaccttgttccatgtacaattttttatttatttaataatgaacatttacctaataatattaaaaaattcatattatggctatgaataaaaagctcaactaggcttacaagctgctcaagtcaagtattaagatattcgaattcgacttgctcaatagctcaagctgcttgagctcgacacgagaatgattgatttggattcgagcttttttaagctaaattcaaataggttgccagcacaagtgtcacatttacattcctaattatagatacgaacactaaacctgaagtctattatttttaacccaaaaatctaaacaagaacgagtttgaacctctacatagaatacttcaccttgagatgcaaaactgcatattcaatagcagatccaatgccagcatat

SEQ ID NO: 14015 - DNA, 666 bp, Gossypium hirsutum
ctattattaagttgataacggaagtttgattcggtctttttttaccggcataataataatttttctcttttatatttatatgttctatcaatttatttctaattataaacaatcaataaatttaatcctaaatattcttattagtatttggtaattgaaagtttttaatcttttttttatttgacgctagtaaaatttgaattttttggcaccaacggaccacttttttatttgacaacttatgatatttttaggccggaaaactaaaaacgttgagttttcctacattaaataacactagctaagagcataaaagaataggcaaagagaaaagaaaaggctacaataattatgattatgttaacaaattttgtaaatgttgatggctaaatttattagatttctctagaattaagactaaattgatagaaagtataaatattgaaaggcaaatttttttattagaccaataaaaaggccacgtcaaacttttgttatcaacttaataataggatgacaaaaatctaatttcaagaactttagtggcaaagctaaaaaacattatagttgggtgaccaaaataaaaatactctcatagttgagtgatcattcatgtagtttataacagccatgtcatccaaccatttccaacttaatagcacgatc

SEQ ID NO: 14016 - DNA, 631 bp, Gossypium hirsutum
gcgtgtaaaaaagaaatccatttaaaatccgaactgaaattgttttccacaagcttaagagcaacagaaacatttgagatcaactatatgaaaatagcttaaatagaaaaatcacctcgaaagatgggttcagtgttcccgagaagcaacatgttgcggtgggtagtggagggattgaaaaaaagacggccagactccattttctttatacaaacttgtctttctatatcttaaacttcgtgtatgtgtgtaatatttttgtgtctaaaactttccggcgagtaaaaagacacaaaaagttgctgtaaaagaagaaaagcaaagattgtacacagataatttctgtgttttacttttacataaaaattaaaagatcataagcttgtggcgaaagaagctagttgtccacaacaaccttgctggagtctccaatggacaaatacaaaatcccattacacttcccacttactgtttactgtaatcaaagaagaaaaagaaacctaataggaaagcaaatttcgaggctctcagacagaggaagctttagctacggagaagaaaaagaaatgttttgtgtcgcttctaattgtttttgtagctaaaggtttgtcaagacgaggcataggatgat

SEQ ID NO: 14017 - DNA, 565 bp, Gossypium hirsutum
atattgcattagattaaagagctcaaacacttcacaaaaatcaagcaatgataaggccatagaaaatcatcacttcctcaaattttgaagaagatcaaaagccaaattcatgccttccaaacaccataaccattccacaagaccctcgctagctcaacctcaaaaatcttcacagcttttcaagagagaaggcttgtgataaaaggtgtgtgcttttcaaaacacctttcaaacaccataaacaaaagaacacttgaaaaatgtgcctcacaaaagcacggggcctcaatcaatccaatgcttttcaatttcatcaagacccattttgaataaaaactcaacctttaaaatcataagctccctgatctccattggtgaaccacagaagtgaactccactttgcccctcaatcatcatacatacaggcccttccaatttaataagtttgattctcaaagaaattcgaaaccattaaaactcaaatcaccaatcaccctatccaaaaccaatcaaaactttattgtcaaaaaattatgttccaagaaaaacaccagacaatgcaacc

SEQ ID NO: 14018 - DNA, 648 bp, Gossypium hirsutum
tttgtttctccatcttatactcccctttcagttttttccattttagtgaatttttcttttcatatgaatttttattctcttcagagggattttcttatgtaaatatttgtatccaattttctcagttttcattcgcgttcgtagcataattcgagttcgatcctacacaaatgaaagaatgacaactattgttttaaagtgtaatagctttgaaaagatatggtatgaaatggtgtagttttaagttacgggtttatttttttaattttaattaaaaaaggacgtggaaatgatgtgaaaaaaaataaatgattaaaaaagtacatgccattaaattacttgcgaactgaacaatttgttagtattttaacgattttggattaaaaaaacaaagaataaattatataaataatcatttattactaaaaattttattattaagttaccctattttaaaaagttacaacgtttcttttttcttaagtccaaaaccattaaactgctaatggtcggctgacatggctgttaacttaatgaattttttaacacataatttccatgtcatattataaataaataaataaataattttaatccaaaactacaacattttcttctcctctttactggtcgtaagaaggaatcatc

SEQ ID NO: 14019 - DNA, 491 bp, Gossypium hirsutum
aaaataatggacttgaagttttaatgaacttcttgggtaggtagctgaccatgaaatgtgaacacaaggagacaatcaaccacaaggtttgaaagcaaaaaaatgaatagccttgtaatgtgaacgacatgggctgctggtgtgaaagctttcaatggtagctttgaggagctaaccagttactttaggaagaataatcagcagctagttgcggttgttgcaatgaccgaaccataatgtcttttggagaaaataaatcagcagctaaacttgcattaatgccgtcccaaacattgcacatgcactcaaattaattcagcatattaactcaacttagacacattaatttcaatagctcaaagacatattaaaaccttgtatttagctaagacacattaaacatgtaaggtttaagacatgtcttaaattcaactatagcttagaacatcttaattagctaaatcggctggacaacataaatggtcagcaag

SEQ ID NO: 14020 - DNA, 385 bp, Gossypium hirsutum
ctaatccagggatgctaatcaagcagccgacaacttggccaaatctggaataggaagatcgtctcactcacttctgccaaattcaacttaatgctttaggttctgttttcgttcttcgtttttacttaagctttccatttaatattatatatatattaaaaattttgaatattctcaaaatacttttaaatttttagaattattattaattttttaaagtatcaaattaatattttaattatagttcaaggattaaaattgttattaaccctttacttaatggatgatggatcaaaatgtgataattcgttaatattaaagataattatgtaatttttaaaagttgagtagctgaaacataattttatttatagtttaggaacaa

SEQ ID NO: 14021 - DNA, 659 bp, Gossypium hirsutum
ccctctggagcagtttattctgttattcatatgagtgtgttgcatgtaagaagcattgagttactttagtggtcaaagtaaaataaaaaagtacaaaaaagaatcatctgtagtgattcttttccaagagatctatggtgcaacaaaataatgattctgatgtacttatcctagtaacatcagtaataattaatggtaagtgttaacaggctgtaaaacatactgtaatgtatttaaaaagctccaaaacaatccctacaaactaaaaaaattgtttcaaatcatcagaccattaaaaatctaccgttaacttgatgatttggagaaaatatattcaaatctaactggcttgctcataacccgacccgacccacgcaaaaaacccaattatcccaaaaacaaaacatgccatgtatctggtgtggctgaaaaaagtaaaatctttgaaaagataaacatttttaagcaagcaaactagctcaagcaatttcagaacaagagtaatcaaactgttcattgtttaagctgcatttgatgagcaatggagctaataaataaagatatgtaaataaaacttcaagaaaatattcaactaattgtacttttgagaataaagaagaattggaaagaacgagagtaattgggttgcgtggaactac

SEQ ID NO: 14022 - DNA, 634 bp, Gossypium hirsutum
gttgacttaatcatcaaacattgattaaccattgataaatcattagctctataaattttttgaattggcaattctaccatataaaagaagcagaaaaagtaatatcattattttccaacattgaaagaaggaacttctgcatactgaagactgatttcgacaagtgttgttagtcacaacgcactgatggaatgaaactaacaaagctagatacaatacaaaaataaagatgagtaaagattcaaaggccatccttttcatcggcagagaaagaaaaagaaaaatagaatggtactaaataagtttccaattcatacttcattttgaagcgctgaagatgcagaaccacgatatgcaggatctaaagcaagaagggtgcttaaaagacccaaggaagaccgaggaaagttcctgaaagcacccgctaaactaggtttgcatgattgcggaggtcggaaagttgttgacagcctcaactttttccaatatgcctctgatggagtaccgcacaacttgaaaatcttgtgaagttgctcaacctggatgccccaaaacaaattctaatatgagaaactagtaacaccaagaattatacagattagagaagaatattagaacgccttaccctctatct

SEQ ID NO: 14023 - DNA, 630 bp, Gossypium hirsutum
tttatttattaggattgttaggaatcaagtttcttattggaatgtttcattttataggggtcttggttttttttctaaacactaggataatttaacagcaattagggtttttgatattgaatattgagtctctgtgatcttgatattttccctcaattggttctgtctttctttcatcctaagttcttttatttctttcccattttctctgttccgccagaattgttcttactatttaatttaccttaaacttcagattttcaattctccttattttccctacatcagacctttttaatggtgtaactaatttgcctaatgctggccaaacacctagaaaaagaaattttgttcaaatcttcctccaacaagccacaacttgactgaaaaatcatggtaccataaaagaaacaaaacctccatttctactacctatctcaaagaacaatatagacagatcaaaaattagcagtcaaaagataaggacatcattgctgctagtaaatcccagagaggatagtagtgagatatcaagaggaaaagaaacagtgaggcaaaggttgttatggaatggagcatcattttcctatacctcaatggtctagcagccagagaatacaaaagatcaaa

SEQ ID NO: 14024 - DNA, 606 bp, Gossypium hirsutum
cacctgttattgtagacacattgcaagatcatgtctctcattacataattttaattttaaggctgttaatggtttgttgttactatcaatccctttatcgttgtttatttgcataatatttttacggtctatgctgtattgttatgtgaaggtcacatcagacattttctatttctgttctccaaatgtaaaatataataatttataaaattttaacttgaccagttcattctatattttcccacggattataactttacatggaatgtttaggaaaagaattatgtggtatataaccatagaagccttaagccttattcttcttaatttcgatgatcaaatgggtggagttgtccactgcttttgaaagagaaacttcattttcacaaaatttaaaggtaaaaatttgattttgaaagttttatatactactgtgtatataaattcaattcaattcaatttaaagttacataagaatcaaattgtttaaagataatatcccatcataatatcctataatatctcattaagaatcaaattgctaagagataatatcctacttgtgctgttgtagtagactggttactaatactctcttgttgcaca

SEQ ID NO: 14025 - DNA, 651 bp, Gossypium hirsutum
tctactactttttataatcctattatagggtagggctagcgaaatagatctctttctgccacgtcacctctagctccatcccactataacctcttgcttgaatatgctgctttcctttccttggaggaagagaatagaatagtgagtctatttcccaaatggcttaggattctcatttgcctttaagtaatcataagtaaagaaaaaagcttatggcttagacctaggaatgcttcgcttcaccggcaagctagccttccctacagcctttccctctgaacaagtgctccgcaggaactaaggatctgaaactttactatcattccttctcttcctaaggttctaacgattcaaacgagactgaaaatagtagggaatcataaagattttcttagtcattttcgcgtctttgaattaactttttttgatggcatggaaaggggagcacgaaagctagcatagggaaggctttgcaaaaccttgccaaagtggaggttttttttcctaaacaatcagtcaatccattaagtcaagttcggcggtaaagcaaggaatgagaaatgccagttctggcagaaaggaaggaagcgtagtcctttcagtgatgtaagtgaacaagtcatggtggaggtcctgctcagttcagtacag

SEQ ID NO: 14026 - DNA, 679 bp, Gossypium hirsutum
aaagtggtccttgcctttagattggtgggggcattcgctggatttgaattggccttagattcaaattttactgatctcagattggcatgcttatggtgtttatagtttatgtgttatctttgttgcactagtaagtcttaggttttttctagtcataagcatcatgattagggctgcatcatgagagtgctaagttttccaagtatgttaagatcatggccccagtgatgttctaacatttttggattcttttataagaatgttaatgttctcttacttatacttttgccttttcctctgagctgcttgatattttgctgacccagccattgtaatattttgttgtcttctatctaatgcaggtatgatcacagtactgcacatgctgtttttgtagttatttcagtattgcttttccattttttacttactggagtatttctggctacatgttgttggtaagagtttagtatctgaactggagttagtatctcttaaaaactgtatcttactgttagctcaggattgatgtgtagcatatatgctgatagtatatataaattgagaagctgtgtaagttagctaatgcctctcattctttttgaaaactcgacctaaatagacatatatctgttctgtgtgttttgattcttttaagtaggtctgaggctggagaaga

SEQ ID NO: 14027 - DNA, 622 bp, Gossypium hirsutum
tcatctatgctcaatctttccagtagcgtcaggcacttagctgttgagcatgcgattaaattgatgaacccatggcatcttgaaacttccagtgttgttagatttttgaaagacagcaaagatggtttaaaagtctttaacgacaactctggaagttgagacaaccttaattcctttaactgatagaatgccgatgtgtgcctttcctcttcgctgagtccttcagaccggactatttcacaaatggaagcattgtttataacaagcttctgaagctttggtagcgaccgaatgaaggaatatggaagagtagtggatgtctcacgaaagaattggaggttaagatgcttaaggttttggaaacactgcaatgagagctgtccatcacatatccccttcaccatatcattcgtcttcagtgttagttcttctaatacagggaaagtgtcctggatggcaacgaatatattagacatcgatgaaagagttttaaattagtaagaactagactctcataaaattaaaagaggagagaatattatttttttcaaaaagcattttataggtaatctcaagtaatgatcatggaatatgaaactgttcgtgagctacctcattgaca

SEQ ID NO: 14028 - DNA, 443 bp, Gossypium hirsutum
  misc_feature (323)..(324): n is a, c, g, or t
  misc_feature (434)..(434): n is a, c, g, or t
  misc_feature (436)..(436): n is a, c, g, or t
ttgagtcgtttcattcaacaagctttcccaaggaagaacgaaagagacattttcctttactgactttgtcttcaacatgctgagcatgagcaagcttttcctctaccttcttgaaccatctttcaacttcttgctttggtattttcccatagtcacactcgtcgtccaattgccgttgaatttctgccttcttggcaagcaaatcatctagtgcttgcttgaaatcagcaacgtattctgtgaatttcctttgatattttagatattgtctagctggacggctgatgaacttaatagcctcaaggattggccccacgagttcnnccattaaaaagctcctctttccctgattaaattcaagaatcagaaaatcaaactacaattataatgactctcatacacctagtcgaactattttaagtggctgaatcctntnttcagaa

SEQ ID NO: 14029 - DNA, 650 bp, Gossypium hirsutum
ttctggggtgttgttgcttaacttcagctaataataatggaggttttgagtgttgggttaaattaggttttggtcaaagttcaatgtttttaatgctctaactgtttgaatgttgagattttagggtggttgtggttggtggatccaagtataccatctgtaaaaagttagcatccattccatccatttttgtaaaatcgatcatccctctattatttttgtattctatctcagtctttatcctcttttatttacctgctcatcttcacgttgtttgacgtatcttgcttttaataattacaatgttgatttgataaatagacacgaaagaataatctatgaatatttcacataaatacttttggtttattgaataatatattatcatcagggatgaagtcagaattttctttttaagggagtcgggattgaattatatatttttgtaagagttaaaatgtaattttactatgatattaacttacatttttatagtttttaggactaaatcaaaattttattatttttaagaggttaaactataatttacgatttattaactcctaagtttataaatgttgaggtcatctatacctaaaattaatcatgttccacgcctgaccaaaaataaacattgcatgacgaagtaa

SEQ ID NO: 14030 - DNA, 625 bp, Gossypium hirsutum
tcaactctgtaacaccgaatttctttacaaactctgtaacaccgaatttcttggctgcaacaattaataagaataaacatgattagttttgtaactttgcttaaccagaaacataaccgatcttggaatgttttgttcaagtaactacaaaaccaatgctaccttgttcgaatctgctggggttcaaatcaacgccaatgatcctcgaagcaccagaaactcttgctccttcggcagactaaattgcagaacagagaattaatgataaataagtcctacactctttctagtcgccaagaagaagaaaatataacatcaaagcgacaagaataactcacagcaagaccgacaactcctagtccgaaaatcgcaacagattgacccttttttgggtttaacaacattaacagtggcaccaaacctacaagaacaaaagcaaaacaagttgtgaaacaagaactccttcactttcatatacatcgtttacatatccaaaagaaaagggggtagaaaaatttagtcattaactaacctgtggacatcccgcagctcaaaatacaaactttatcaagtggagcacgtggattgatcttggcgacctggccgacatggacaacagtatatt

SEQ ID NO: 14031 - DNA, 425 bp, Gossypium hirsutum
gtaaatgtcaacggtttgatgtggcatttgagcttcacaatttcctactcaatatgtcattttctaattggtttatcatattgaaaccagctaattttttaattataattttttgggaaattaaaatacaatttgatatattattttatgattttataatttttttaagggattaaataggattttttttaagaatcaaagtacaattttatcattttccttatttttatgctaatgaaataaatatatattttggatacaaatatagatattaacatgtattttttctaattatatctgttctttttggcacattatttagaactatctatagttcctccctaacccataaataatgctttagcacactcaaatccacgttctcttacattaacaacaatatctatgccaatcgaactaaaact

SEQ ID NO: 14032 - DNA, 593 bp, Gossypium hirsutum
tgaataaactaataattctataatcaagagatagaagttatcaataatacacccaatccaagatgattgttccatcattaggtgttaaaagtcaaggagaaaatagtcccacagaccataatcaataaacttccattttatttatcaaaaaaataaataaacttccattttagctaggattgataaattaagaaatatcaccactgcattgagacaatgaaaatgctagttaacagtatattattgatcacagtatcaagacgcacagatgactatatatacatatatacacatacatttatatttcctctgtagaaaaacatgttatcactgaatacttgtaacacatttttatatatatctaaaatataggtgaacaaatcaaaggataatgtcgtgtcttgtgtgacacatatggaaaagaaagagtaaggctttaggacaaaaccatcagcaccttatcctaatccatcaaaatccaataatgaagcctaggctgcatatctttaagttaaggtgaagtattatgacactttaaagagctaaaaatttaactactaggtgaaatgaagcataaatagcactgtgtagag

SEQ ID NO: 14033 - DNA, 310 bp, Gossypium hirsutum
tttgttaagctttttcttttcctcgacgggcaatattaagataaatattagattaacattagaggttaacgttggattaatattaggtaaaattaatagaatatgatttaggtgattattatacatgatttaaaattaaataatatgataaataaaaaaattaaaaattaaaatgaaaaacaaattcagaaatgaagtaggagttagagttggtgagaatttgaatttggaaataaatatgatttttttaaagggacatttgaaatatatacatattattttgttgaaaatctctttcattttttttttc

SEQ ID NO: 14034 - DNA, 661 bp, Gossypium hirsutum
attttgcatgattaagttgactgtgaactttatgttaattaattgcattattagtctttttaaaaaaaaattgcataattagtatcttaaaaagttatttcagtataatttcatgacgaatccgattgccttctcttggactctgactataaatttgaaagttcatttttttaatacaaaatttagaagttcattttgaaagcgatgtagccagctaagaaaaaagataatcagatagtgatgatcatcgagggcgctttagcgttgtagttgagttcaggggttcgatttatgtgtgtttttagtagacccggtaacagaggatataatcacagtaacacgagtacaatataaaaaataataattaaaaaaatgatacaaagaacacatggaaaaaaaaacataaacactataggaatacacatacctgtcaaaatttttataacacattgcaaactaaaatacgattataacacgaatgaccaaaactaaatttttgtaacaagttcaataagttcagagggttcattttactattttatttgtcatgctaccaaaaattggaagagctagatgatttttatttgtcatgctaccaaaaattggaagagctagatgatttttcttttttgttagtgataaaacaactctctctctccat

SEQ ID NO: 14035 - DNA, 434 bp, Gossypium hirsutum
aatcatcatagatccaattttacttaataatgtctctacttaaaaagagaacataaggtcgaacattacaaataacattattggaaaacacaaagcacacaatcatatcttaaaaacgatattattgagaggataattacgaattcgtaataatttttttgtaaaaaaaaaatcagatacatcaatttggggctttcagcccaatgtcccaaatttattaagaaaacccaaaatataaaaaatttcagcatgccattgccaacaccaacttcaacgtaaccgaaaataaccataataatttcacttcaattcatctatctcttagacccttacacacatttccaatggcaactctgttaaaccctccccctttccttttacccacaaagccctttcttccaactcactcccccttctactctgggactcaactc

SEQ ID NO: 14036 - DNA, 669 bp, Gossypium hirsutum
tggactttggatcttacttcgagtctcgaagtggggcctgcaacaagccaagctgccggagattctccgtgtcagaacgcacgatcggtgttgacaattgccttccagtttcccttcgataccaatcttcaggataatgttctgaccatggcacgccagtatgtccgtagtgtcatttcttctgtccagaggattgctatggccatatctccatgtggatcgagcccaactataggaccaaagccatctccaggttctcccgaagcgcttacgttggctcattggatctgccagagctacaggcaagttgcttagaaaaacattagtagttgtcactaacatgccacgctagagggtaaaagtaccattaaagttcctgtacttgagagttagattgcattttgctctctttactaaaaaatggataagtagtccttgtacgttagataaaagagcaaattggtcttattaaaatttctatcaatttttactgttaaaaaattgtccctgtatgtcagtatgaagtatacgtgtttcattagtctagtcaatttttaaggatacaaatagatgaattttttaacagaaataattaatttactttttgataatttgctattttttaagtagaggggtaaaatgtaaattgactcactgtacatgggcttc

SEQ ID NO: 14037 - DNA, 692 bp, Gossypium hirsutum
tgcttggttccataacctcctacttaatgtctctgcagccagagaaaatgtcaggaacaataaagcaacaacttgattccattacgccagcattgcgggaaatgcggttgaggaaagaagagagagtaaaccagttcagagctgtacaagggcaaattcagaaaatctctgccgaaattgctggtcagtcagaatatgatgactccataacaaatgtcaaggtgaatgagaatgatctttctttgaagaaacttgaggaatatcagaatgagctccaaagactccacaatgagaaggtacataatatcctcaaaatttgtattaaggaagttgtacagaggaatcatcctaattaacatcatatacttttctttccggttttattcttctgaagaacaacagactccagcaagtggaaaaatatatagctgctgttcacaatttgtctgcaacattggggatggaatcttccatgattattacaaaggttcacccaagcttgaatgaattgtgtgggatttcgaaaaacataagtgacagtattttggccaaactcaacagcacagtggagtcactgcaagaagaaaaacaaaagcggcttgagaaggtataatgttatgccattattcttccgtatgatcttttaaggggagctagcaccatgctcttgccctgcagcaaatagtacatgg

SEQ ID NO: 14038 - DNA, 440 bp, Gossypium hirsutum
  misc_feature (15)..(15): n is a, c, g, or t
  misc_feature (374)..(375): n is a, c, g, or t
  misc_feature (381)..(381): n is a, c, g, or t
  misc_feature (383)..(384): n is a, c, g, or t
ttttaaatgagacgngtaattgtatgatccttgtcaggtaactttacaatctatactctagatacttgtgtttttttttttcgggggatattaatctctactttgtttgaaatctatctcttctcttgattaaaaacctatgaattcagggcatgcatttataatctgttctcctcggtagaactgtcaacttcattctactttcattcattttctttgaaataatttgctcagaatactttgactgaggaaagcagagtatgcatggttttgcaaatttgtaaatcaatgaaactgatatttgaaactaggtttcttaaatcatgacgacaattacttgttcaattttgttaatatttcatttgataatcttnnttattnannaaataatcagaccccgatttcaacctaagtttaataatgacttgtattgatttgta

SEQ ID NO: 14039 - DNA, 565 bp, Gossypium hirsutum
  misc_feature (468)..(468): n is a, c, g, or t
  misc_feature (470)..(470): n is a, c, g, or t
  misc_feature (504)..(517): n is a, c, g, or t
ccaagtcctttgacatagtgaaagctaattaataaatacaaaaggaagcgcacatgaataacgatattttctgttttcatcccattgtggacctccggactacaattacactagaaaaaatgcaatcaatgggaaaaaacgatagtccaatcaaagcaaccactaaaatttcaaatttctcaggttccgaacagttcttgttcccgacaattccatcaacaaaacgatgaaaatgaagtaagctcctaataaccataagaacataagatccaaagccaaaacctcagattcagatcattacataaattgatcctcaaatacaccaattagatctataagaaattaaccaaaaaaaaaatacacataccgatttcaattgccgccgcgaaaccaagtaaccgccatttacaaacaagaatgcgttaaagctttgaagctctccatctctctgtaaccgcggaattttgnanaaattttgtagaaagagagacaattgtagacttnnnnnnnnnnnnnntatttcttttttatttttttggtgtgtaatttgggtttaaagtttttt

SEQ ID NO: 14040 - DNA, 652 bp, Gossypium hirsutum
cttgagtattcgagactcgtggatgcaaatgctgaggaaccttccaatggcccgataaattcagttcagttccacaggaatgctcagttactacttgctgctggattggatcgaaggatcaggtttttccagatcgatggtaaacggaataccaaaatacaaagtgtttttcttgaagattgtccgattcgtaaggcatctttcttgcctgatggttcccaggtcattatagcagggaggaggaagttcttctactgttttgatttagtgaaaggaaaagttgataaaatagggccactggttggtagggaggaaaaaagcttggaagtttttgagatttcccccgattctagcacaattgcgtttttgggaaatgaaggttatatcttgttggtttcatccaaaacaaaggagctgattggagcacttaagatgaacggaacagtccgctctctagcttttgctgataacgggaaccgattattgagctctggcggggatggagaagtctaccattgggacttgagaactagaacatgcatccataaggctgttgatgaaggctgcattaatggtacggctctttgtacatcactgaatggaagaatgtttgccgctggttctgatagcgggatagtgaacgtttacaaaa

SEQ ID NO: 14041 - DNA, 513 bp, Gossypium hirsutum
ctcgaacctctactaaactctgctattaaatttataaacttttttttaagagattgtcgttccaattttcgtaaaaaaaaattagcgaaaagaaaaactatataccatcgtcgatcaaatatggtatacacaatatatatatattcataatctagcatgaattttatgttgcaaatcgtgatgatgcatttaagaatcattaaattttgtgtcgtatatggtaaatgcagctaaagtttattttttaaactaaaaataataataaattaagggaaaaaagttaaaactacagagcaaaatgagggaaactaaggcagataaatttaaaaatatatgaaccccaaaaaattttattttataatattttaaacttgtttctcgttcaaatatttttaattaacttaaatttttttatttttgtaaattcattgattgaattgatacctctttttctcgtccaaccaatagacataaacagacattttaacaccatacttaatttaggaccaacgc

SEQ ID NO: 14042 - DNA, 654 bp, Gossypium hirsutum
gcatttgaaagtaacgaaaggtgaaacatttccttttcgctgtaatgaataaaaataaggggagggcgggggggtctaagcatcagctcaaaagggtaaattggtctctctatcagaggaaaaaaggtgtctactttaagcctaacaaccaaaagggattttctgtgtatgggatcaaagaaagattaatgcaattcgaaggacctaaattggttactattttttgacctttttagcctaataaatagaggtgaggaaagcaagctctctctctggcactaaatactaggcaagaagctcttttcaaatgccaaagtaaaataagtacatacatagaagagaactacatgcacaaatctatatatattggaaagtagcatagcataaatctataaaaatgaatcttggcaaaggaggagtcggctaatggggggaagaaagagagagagagagaaaaaaaagtgagacacataggagggtttaacatgacattgacacgtccatacgtgacttggcactttagcttttgtttggttcttgcctatcttcgggtgaggccggtcagaactacgtaaccctgtaaatataacgagccaaatgatgatgctagccaccatccatgaggggcacgaccctctatgcatgtttcaattc

SEQ ID NO: 14043 - DNA, 652 bp, Gossypium hirsutum
tccataattcgctcatgaggtttcaacaatgcagtataaacctgaaagttagcaggagatccggaaagtgactgcacattgactgcataatgaaacagatacaggataagttatatgctacctagaaagtaaatattctgtacacagaatccttcgcatgctcaaaataaagggtgaaaacagatatttaactaaatatagaaaagggtttgcacgatccattcacctccccactttgcaggatccaacccaaaagcctctagtgcacgcgtttgacacaaggactcagccatgtcaatgtatctgatcaaatagaattaacaacattagacagtgactttaaccaattaatctatgttattcagactgacttaaagaaaaatgaagaatcagagcaacatagttatcaataatttatactaaaaagtaaaaccacatataacatctctagcaatgcatcttattttccaattcaatcccctgaaaattacaaccagtctgaaatcaatttgtagatgaacccacattcatttttaaactgatattagcagtgaaataaaattaacaatatgcaaaatcaaagtagatcgtcttaactcgtttcctccgtagtatctagcaccaggatacccttcactgtacttggttggtc

SEQ ID NO: 14044 - DNA, 553 bp, Gossypium hirsutum
  misc_feature (208)..(208): n is a, c, g, or t
  misc_feature (496)..(496): n is a, c, g, or t
  misc_feature (498)..(498): n is a, c, g, or t
cataaatgggtatggggatattgacctttcaaagatcctccaaatacatggaaaaccttagaaaaagtgggacatatctgtacctgacacttgcaccaagtttgagtaatatagttttaagctaaaccgaacaaagcttgagtgctgactcaaccagaagtattcatgctccatcttgtaaccagaagccacctctacaacatagttntagtgtatcaatacaataaaaatgctatagctggtaatcttcaattttttattagcacaatagcaaaaggaaggcataaaacaaaaatatagcctattccaactcaagtttcatggttgattgttctaccaattatgagcataagatcatagataactcaatctaaaaataaagtctttcaaaggatattacaggatcagaaaagcattttggatcattctaggttatagatctcaaccttgaaaaatctttgcaagttcacttgtcaacatagagtgatgacagctnancgccaaccccgtttcaaaagttttaaacaaaccatctcaaaatatcaatggtact

SEQ ID NO: 14045 - DNA, 676 bp, Gossypium hirsutum
gatgactatcttcgggcttctcatgtgggatattttattttcagatgtaccaaatgttttccgcaccagattccaggtacaatgctcaatgtcagtcataaaagaaacacaatattttgaattgcttttaaaagtcggtgatgctttgtaattcattacatgcaagtatgtgtttcttcatgcttacgtattgatttgattgcaatgccactttgaaaattttggttgtgttgcttggttcattctgagtacatgatacgacatgaccacctaaaacatgataaagataagaatatttgaatgtttaaaattttatataacacgatttattaacatatcaaaatttgtataaatataaattactatgaacatgattatgagatgacaagatattcaactaaatgacttgccagtgaatttagctgttataaatcgtaacaatcggaagggtgatgagacagaatctgaaactcgaaactttctccaccctttaaatgataacatactagtataccatttatatccttcaacatgattgcttcgaatacatatatatttgaagacaaaagccatattactcggatgagagagttaggtacagatgtttaattttcttttaagtaatttccatgtacttggaaggtctttggagagtcatccgtataccctatccgaa

SEQ ID NO: 14046 - DNA, 645 bp, Gossypium hirsutum
aattcttgggtagttgatgtgggattgtttttccccagggtttgatcccatagaggcgccattgtttatgcaagggttgttggactgaattattacgaggtattgtccattttggaggtctaaagactatttttttggtttatctttcgaggaaaatttgccttataaggaaaggctctcactttatcaagtcatagtccaatctttgattagcggatatgagatgttttccttttaacacgtcattaacagcatttttcactgtcattataaccaaaacgcctgcattaaggaaattcattgatcctagtgatttggtcaagcatggttagcccttgccagccatattaatctgaagcaacaaattctatatacaggttgaagtgaaagtaaaagagaattggcggcaagatgaagggcttttgagatattatggttatggagggcaaattcgagcactatagcgtctttccccatttcatacaggtcacttttgtgtaattttaaaaagtagttttatgaaaatgtttgaatcagttttgactaagtaggggctcaagaaatgtgggttttgtttcagatttcatcttacaattttgtttttcccccatatcgtgaattattatgccgatatacccttccaaa

SEQ ID NO: 14047 - DNA, 627 bp, Gossypium hirsutum
aattcatttacctccactttcctataaagtatcaaccaagcaaccatagctctttcatcacaaagaatgtgacaatagatctttgaggaaaatccaaatttgtgtcaaacaccccaataccaaaacaaacacccacgaagcatgtctccagcaattaatgttcactccatttccaacaccacctcaatttcaaggaaacaatagtttcaccggcattaagacaaatcaatggggcctatgctgctatgccttgtattttgctcatatggtctagaaatttctctgagctacaatttttttggcctcttatctagaccttaccctgtacattatactgctctaaatggtgaggaaaggctaaatggacttgaatttccaccaatacacttaagccactgtgtagtctaacaaaactgctttgaaagtttccttttgtgtaggtagacttgtgcacattccatgaaagaaaaatggtataaaaaggcatgccttagtttgctttcttcttttgttaattcccttttatcataactctttatatgctgtatttcacactgtcaaaaacagacccatacaatgcatcttttgcattaataagactaggataatgtggtgcactttcaggaa

SEQ ID NO: 14048 - DNA, 458 bp, Gossypium hirsutum
  misc_feature (11)..(11): n is a, c, g, or t
  misc_feature (21)..(21): n is a, c, g, or t
  misc_feature (47)..(47): n is a, c, g, or t
taggctaaccnaccagtattngagccaataacccattattttgtganattcaagtccttgatcagtttagtttgagcatgaacaaagaagcttccaaaattatgacttgttattataagttggtgagactatttgcaagaaccgtttacataggcatgatggaatctcactgaaaggagactgtttagagagtaatttattaccatctaaagctcatacttgaacaaattataaacatagaggataatattttgtgtatcaagatgctgccattttctctatcccatatcttattatttctaacagcaagcaatctatgcaaaatatatgcataaaatcagtaataaagaaatattggtgtgcaatagtgaacaaaaaaaggtaaaaacaaggctactaaaatacatgacaaacgtcagtatgctaaagaatgtttaggcactgtgcaggagagctat

SEQ ID NO: 14049 - DNA, 655 bp, Gossypium hirsutum
gatggaatttgttatgtttgctggtgatagaaagatgtttagtatggaactttttgatgagatccaaaatgtgaaatggttcggggctgtttcagttggaatgcttactcattcggttaatactgatgagatggcgaatcagaaaaaagatgaagaggagaatcctagaatgtgttggaacattggcagcatgcattgaactaaactttcaaaacaaaaccaataaagatcgaagcagaaaagaaaagaaaacaaagcagtgaacaaaacttgaatgcacagcaaatgtaactgaacaactttctttttcattcaaaatttgaaaatatatattggagttacaattttcgacataattgacagttacctaatgacataactgctcccacttaagttaaactaatactagctttaatcaaatacaaggataagctgacataccaagttttacatcaaaatcccatcactaacttaatcctactaactttgtaagctagttaaaattgaactaagcaaaattacataacaacaaaatgaccaaatcagattgcttcattcggtccagtttcatccttgtgcaccaagcaaagctgctgaactcgatggctgcatgctgctggttttatgttgcactgtaggccaactctcaacacta

SEQ ID NO: 14050 - DNA, 667 bp, Gossypium hirsutum
gcgtgtcctgcattcactttactagcaattttgttttgtattgtttgtttgttgctgatttttcctcttcacatggtgcagtggattgacaaggagaaaactggagaatgaaaagaatttgcaagttccaggttcctttttcgctttagtatgaagctgatgtgtaatcacattaggttgtttatgtacttgctttggtcatgcttgttagtcttttcattgaaatgaaactagtcatatctagttaaatatgcattttactggttctgttggtatttggattttgagagtgatagcactggatattgcagtgatgtccagattttcacatgctgaggtctaacagcctaagatcaacacttttctgaatatatggctatctttttgttggaatgaaagtattcttcatgtgtattttatgatctacaacactaaactttttgggatttgtggttgcctctactaataatctcatttctaaggagagaactcaaacttgacttctgtccctagagtgttgtgtcttaccattacagtttattttcagatacttaaaaagttgcatgtacttaaaaagagcctccaaaaatggtcttaccgttatgcctatgctagagtctaagcccatagactagcttgaaatatgaaagctttggacagtcgtatg

SEQ ID NO: 14051 - DNA, 611 bp, Gossypium hirsutum
ttttggtactccccgcagtttttgactcttttctatttggacaataacgccccttttgaaactgtaattttttgttttttttttatttttattttaataatataatttattatcttgtgcatattattagtaatgttattaattgaattagtgttgcaaagcaactcgaccctaatttacaatgataaaccattgtaatgcatttagtattgttaatctgatgtatttagtgtttgttagtatgattaattaatttcaaaccatatgtttcactatttacgggatgctatttttaaacacacatctatattctaaatccgtggttgtaataaggatttctacttatttttaatgcctattttaattatatactatatatatattataaatatatttaaaataattttaaaaaataatacatgattataagttttaataaaccaataatttatcctaagactgaaattgatttaacagagaaagcagagttaaccgaaatcaacttggcggaaggggtctgacttgtgctttcgtcgtcttaaatcttgacattattttactatgaataaatttgatcatttattttcaggggaaaaatgaagttgctttct

SEQ ID NO: 14052 - DNA, 405 bp, Gossypium hirsutum
agagttgaagaggatagagaacaaaataaatagacaagttacatttgcaaagagaagaaatgggctgttcaagaaagcttatgagctctcagttttatgtgatgctgaggttgctcttattattttctctaaccgtggcaagctctatgagttttgtagcagttctaggtatcaaccctttttctcttctttcttccttcattcattctttctttctttttgctgttttgatctgtggatctgttgatttcttttgctttctgtgttgatttttgaacttcttcttcttcttcttcttcttcttcttcttcttcttcttctttaagcttcatttgatcttgttttcttccaatattttccttttatgaggatttaggttataatttccctactttctggttgttg

SEQ ID NO: 14053 - DNA, 654 bp, Gossypium hirsutum
taacaaatgtggaaatcctgcttccatcaaagtgtcttttaaacccccctcggcgaattccatcgtaagctttttccaagtccaccttcaaagccatccaacaattccttcctttgatcgtcctcatgttgtgaatggcctcctacgcaataatgatattatctgaaatactcctccatgcaataaagcttgcatggttttgcttaactatactggccataattggtcaaagtccattcactatagttttagtgatgattttatacaaaaccgtacacaaactaattggtcagaattgagagatgacctccgatcatttagtcgatcaaagttctagtaatcttcggatccaaaccttgcaccccaagaacctttcgaactagcgaacaaatcgattccctgatagtttcccattgtgactggtaaaccttcacgtggaacccatcaatacccgatgctttcagaggtgccatagattacatacctctacaaggaaaattccccattgcaagttcctcagccatgtaaagcttctggaagaagtcgatagcatgcaactttaaattttcatcatcaaagcaccattccccttcatcgaattttaatccctcaactttatttattctccgccttgtcatcattcgactatgaaaa

SEQ ID NO: 14054 - DNA, 504 bp, Gossypium hirsutum
ttgtgattagacaagtttagatggtatttaaagcttgaattatctttaataatagtcaagtatattgacatatgatgagacttgaatgaaaaaatttatgtatggtaagattaaagatggcaatagaaaagaaattttgtcggtctcaatataacattaaccttaaatccaaacttaattaaatattaattcactcgtcttgaatttactaaacccgatctaactcacaaatttaaatttttatatttttattaaaacagaataataattattaatttgttatattttaatgatatttttaattaattttagacataatttttaagagtattttgataattctaaatataagcctctaaatcgtccctacacgtcttcactacttttagaattagacctcttttggagacgaatttccgccctcaaagataagatgatgtggaattagaacctttttaatctggatttttacttctaaacttaacaaacccatcacccatagaa

SEQ ID NO: 14055 - DNA, 595 bp, Gossypium hirsutum
ccatatcatgcctattgctgactaaaacctttcccaaccaacctcaccttcagtctattgagcgaaccatcaacattgattttggttttgaacacctacttaacgccaataacctttttgtacgacggtttgtcaacgagctcccaagtctggttcttgtgaatcatattcaactcctctcgcatggcttctttccaaccttctatggttttagcttctttaaagctcgcaagttcaagtagtgctacatcagcttgctgatagatctcatcaatcgatcgtgtgccctttactaaagtgttgtcaaagtttgcttcaattaaatcattaccagattgcggccttagctcgcttccatcatcataattttgcgaaccttgtttgcactcccattgctcaagtatttcaacttcagtagcatcccaatttcatgttttaccttcatcgaacacaacatccctactcaccaaaattttcttagaggaaggatcataaattctataaccctttctattgctgcaataccctaggaaaatacctagctacgacctcctccctaacttacaacctagctacgacctcctccctaacttac

SEQ ID NO: 14056 - DNA, 668 bp, Gossypium hirsutum
gcctttggatactgatgatgaagataatcaatgacgactcgggcatcctctgtccagccagcattataaaagcaatcagactgcaaatgtgttattacaaaatacaacattaaaagaaatagatctatttcacattaacaatgttaaacttattaaaaaatcatgaagaaattattaatatgaacagaatggttaagcgatgactaatctttatttaactacaagatagctcttaacatctgaaaatttccagaggaagtacaagaagccctcagcttttaaccaatacactatagttttcatccatgcatacttgttccttggagcatggcatacaaacatagccaaatacatctcaccaattaactaccagtcaaagatctaggtcactgtattagttcttaatagaggaactaaatgaatttttaaaaaataaaacaaattaactagaaataaagcaccgcaatgtaatgtgccacaaacaaaaaatgcaactagttttattttactcggactcggagttcagtgttatatacaggtatggtcaactttttctaattatttccacatatttggaaggtcatatctccatatctacatttattgaatatcatcagatataggtattttaaggagcatgaaaagtctgcacaacataggcctaattg

SEQ ID NO: 14057 - DNA, 608 bp, Gossypium hirsutum
taagtagaaccagattcaccaccaccatcatcatcacaatcaaatgccacggtggttatctccgccgtgacactggtggcgccattatttcaacgaatcgtgaagatgagttaacgaaccaccatagttctagtagggaaccattaaggcaaggtaacaacttacctgagtcaactcggcaaaagccattggaatcgagtcgaaagagttgtcctgaagggaaaatcaaacgtgggtcgtcacaaaaagggaataaaaatgggatggctgatttggtagtggtgaatgaagaaaagggtagttttgggttacaagatttgatgaaagcggcggcggaagtgttggggagcggtggattggggtcggcttataaggcggtgatggggaatggagtggcggtagtggtgaaaaggatgagggagatgaataggttagggaaagatggatttgaaactgaaatgcaaagatttggggctcttaaacatcctaatgtgttgacgccattagcgtaccattttagaagagaagagaagcttattgtttcacagtacatgccttctggtagcttgttatacgcccttgcatgagcttgttatacgccttgcatg

SEQ ID NO: 14058 - DNA, 436 bp, Gossypium hirsutum
ggaaactggtgaaacagaatctaattactggaaaaaaaatataaactcgagtaaagagaataatggtaacaaagctgggaatggggatgaaaatgaattcacgacgctaaagggaaaagaaaaagtcagagttggggaagaggaatcagaatcttgctcccttatggagaagtgtccaacaaaatcagtaagtgatagagggggcaaaatgaagtgtaaaagaaaaagaacaaaagggagtaatgaggagaataacgaagagagtcctactagattggttcgaaggaaattagtggacagtctttcaccttgcaaggcggtggctggtgaccagccctgccaagagcaatgaagtttttttgctggaactgtcatgggcttgggaaccctgtgacaattcgggaactcaagcaactcatcgttgcaaataaccctg

SEQ ID NO: 14059 - DNA, 700 bp, Gossypium hirsutum
ttttgagtccctctaagcatctcatgaagcttagcttttttccttgtttattcaaatttattgctgttttcttttaaacctcttttggtacaattagttggagcatttgagaccccatcctaagattcccttgacgatattttctttttggggctgggagtattgcatttgttttaaagcattttctcaaccacaaattttaaagttcttttttggatttggacccataatattcggtaacaagctaaaaatagtatgaatatctttataccaagttttaatttgtattttgtctattctactaaaaaataagtaaatatattttagatcaaaatgtaaacttgttctctctgttaaaattttcattcatttctacagttaaaaattcaaatgctaacatgtattgttccaaatgtacttcatgttgacatatatgaactaatttttaaccgcagaatgattcgtttacactttagtctaacatatgtgaactaatttacttaatttttttaataaagagagtaaaatataattcaactcttaatataaaaattcaatagttataatgtattcctagttaaatcggatccaactttaaaattattttccttgtatttaaaaatattaaatttagatcaaattggatggggacacgtttaaaggtttattttacttggtttaacatcacatagctttcgag

SEQ ID NO: 14060 - DNA, 619 bp, Gossypium hirsutum
agtatggctcactgcgagtttttgggtgtgcctgttttcctgatctcaggccttttcaaaagcacaagctcagcttcaggtctcaacggtgtgtattcttaggcagtgttcctactactaaagggtatcgttgtcttgcagaagatggtcgagtgtttttgtctcgacatgttcgttttgatgagaccaaatttcctttcaatgaggggttttagaaggaatcatcttctaaatgtgtgccgagttgttcctcgcgttctgctcttcttttggttttggcaactaatccatctactgtttctcagagtttacctaccacaacgccaccaagatccagtacaagtatgcattttgatgagggaccttcttctgaacaattacaacccagcctagtgcctactcctactagggttcctgatgtcgtggtggaacctgcgagtaatggtcaacataatggtactataccagctcaaatcccttctgtacctgaaaactgtcattctatgcagactcgttcaaagaatgggattttcagacccaaggtctttgcttctgttgttgatgagactgaacccaccagcattggtgaagcccttcaaagtcctgtctgggacgaaag

SEQ ID NO: 14061 - DNA, 652 bp, Gossypium hirsutum
aaacccggcccagatgttatggtcgaatccgacgtgccatattaaagataaaaatccatgtttcattttagtgttttaaaaactgacttttgttaagctaacaaagtgaatggaagctgggcaccaggtaggtatccataacagaggaggtgagccatgaaggctgcttaagtaccaagctcttcggttggatccaatcctagacatgcccacaatcattgccacacttggttataacgagttgaaatttctttgagtggatatcttcgataaatagaataatcgtgatgttgtgttattttgaaaacaagtatcgttttgaaaacgcatcctaaatctagcccatttgaattattatcaaccagtttaaagttattaaaaataaaataatcacagaaaagaaaataaagttaaaatgaccttattacaacccaaaaaataaataataaataaggtaaactaaagaaaaccaatcacttatttcaaagcccaaaagtgatcacagtggccactttgaatcccctccggctccaagtccccaaatcaaggctcacctgcaaggttaaggaaaggggggtgagtttggaaactcaatgtgcaacaagccccttttagagcccaaaacaatatcaactcgctgggcctaagtcaa

SEQ ID NO: 14062 - DNA, 725 bp, Gossypium hirsutum
  misc_feature (654)..(656): n is a, c, g, or t
  misc_feature (662)..(663): n is a, c, g, or t
  misc_feature (669)..(677): n is a, c, g, or t
  misc_feature (679)..(681): n is a, c, g, or t
  misc_feature (684)..(685): n is a, c, g, or t
  misc_feature (693)..(699): n is a, c, g, or t
  misc_feature (708)..(711): n is a, c, g, or t
  misc_feature (714)..(716): n is a, c, g, or t
  misc_feature (719)..(719): n is a, c, g, or t
  misc_feature (721)..(721): n is a, c, g, or t
ggagtgctccctgatgttgtaacttacaatatatcgattgatgcatactgttgttttggaattgatgctggttatgccattctccatcgaatgagagaagctgatgttaccctagatattatttcatataattctttgatagctagtaccactaggaatcaccaaatagatcggtcttttgatttatttgatgaaatgattcaaagaggcatagcccctgatgtttggagttacaatattttgatgcacgaccttttcaagttaggaaaaccagatttggctaataggatttttaaggatattataattgctgagtattcaccttctattgctacttttaacattatgatgaatggtctttgcaagaatgggtatacaaataatgcttttatgttgtttaggaacttacagcatcatggatttgtgccagagttattgacttacaatattcttgttagtggattatgcaagatcggtagattaaggtcagcaaggagggttcttaaagaaatgcttctttaggaagaagaagtttgaagagagaattgagctattgttggaaatgaagagtaaaaggtatacatttgttggttttgcttattgcacagttattggtgctctaattaagataggtaaggcgaaacaagtgaccannncccctnnttttcnnnnnnnnntnnntcnntcttctcnnnnnnntctcttccnnnnttnnnttntnccct

SEQ ID NO: 14063 - DNA, 662 bp, Gossypium hirsutum
ccttgaaactctcaatcagctttgatttttcaggatcagaaatcgtcctctctctgaccaatacaaaagtggggtgccccagtttggtgcttgcctccaccatgaatttcccaatatagccagcgcctccgattatcaaaattttgcttttctcagccatgccaaactctctatagaagaggaaatctggatatattagtttgaacagaggaggctagtgagtccccccagttcgtattttctgatgttccaaacagaagaacttgattccttttcaagtacaaaggttcaaaatggaagcatcgtcagctcatccgtccttttcattcctggacagctcccactcctttgatgtatcactttactcactattggtatttaaattatatattttcctcatcttgttactttatttttccacaaatggtatttaaacagttttttcacctttattagtccaatttagtcgattagttaaatctatttttaaaaaatgtttaatttacaaattggtatctaaattatgttattttctcattttgatatctaatttttttttcataaatgatatcttaactaacttctttttccaagttgatatatcccttagttcaatcattaagtctatctaaaaaaaagcttaattgaataggaggccctta

SEQ ID NO: 14064 - DNA, 420 bp, Gossypium hirsutum
  misc_feature (288)..(288): n is a, c, g, or t
tttgattcaaaaaattaaaaaaaattaaattttgaatcattcaaatcgagttaatcaaaataatcgactcaactccatttttttttcaaattcgaataaacctaatattaaactaccccatttttgccactcttcaacttttttttaccttgcctttctcttcaatatttttttttgttttccctccctttttaccccaaaaatcaaacccctccacaaatttttttatcacccttccctttttactcccaaaaatcaaaatcataaaaataaaaaaattacataaanataaaaaaaatcaattttattttttaatttaacccgaacaaatatatttgatttgattcaaatttcatctcactcgactcgattcaaaaaaatttcaaatcaaattagaatgataaaatagaattcgtcaat

SEQ ID NO: 14065 - DNA, 670 bp, Gossypium hirsutum
ttgtaggaaatagacataatgcacgattatttttaaaaattaaaaatttaatccaaacataaataaaataaatggtttatccaatttctttttaaatataattacatttaaagaaataattataacattatatattagaccaaaattcatgtccagttttaaatattaatatcccaaatataatttataacgaaagtaatgcaaaaatatgaccgctagaatctaatcattttaccctaatcctataaataggaggtcattattttttatgagcaacaaaatgagagcttcattcattcttcttgattttctcatatttcttttttctaaaattttcgcattttattaaaattacagtaaagaaaatttgtagtaattatccaacaaattcatatacaattttaaatattatcccaaatataaattaaaacaaaaaaaaagaaagtatgaaaagtttgaatttctaatataatttatttccacaaagactataagacttttagcatatatttttctccataaatatactacttggaaaagttgtgtgagcattgtttcaatggagggaggaagatatctacttcattgctttcttttagctcttcttactaccaaagcagcatctcatctttttcaatccaatgccaatgccaatgccaatcgaaaggtt

SEQ ID NO: 14066 - DNA, 655 bp, Gossypium hirsutum
ttttaggtccgattgataggttcaacctaaaaaaatgagcctaattttttgtccaagcttggctcggataaaacataaaaaataataaaataaatatttcccaacaaattgaattttttttataaaaaaaagtctttatacttaaataacactaatataggtgtaatttaacaaacaaatgccttcaaaatagtagtaaaattaacaataaaacgagagttatacaatatctaaataataacaacaaaatagtgaaatgatagcaaaacagtgaaaaaacaacaacaaaacaacggagtttctttttgcaaatttgggccgagccaaaccttagcaaaaaaaacctcacccgagaccgaaaaacgggtattattttttgttcgaacctattttttaagtttatatattttttaaatcctctcacttttaaaacgggtctttgggttgaaccacctgacttgactcatggacaagtctatggagtatattccctctcaagtgtgaaggagtggattggaatgttgttatttaaatcaaattgggcctatggcatgttgattccaataaatagctttctccattttggaaatgggctaagctggtcactgcccaaaacatatattcatacatcaaaagtaatgagatcatatgcggc

SEQ ID NO: 14067 - DNA, 552 bp, Gossypium hirsutum
tgacgggtgagcatcatggatacacacacgttgcccttcgtatgtcgttaacgttatcattcaatggaagaaagtaaacacaaggggatggttctcgactcaacacaaggacatccaatttgacttgaatggataatgttatgttagccggccctttaggccttgagagaagcatcgggccaagctttgaatcacaacataaactcatgtacgtagtttggagcaaagagcaaagtcatacaaaagctgttaaagacctcacaattcacactccattggagatggtatcctcttgccagtgacatttggtatctcaaaaggcttctaacagtcaatgccatcagaagagatgggaattgagaagaccaacgacatattaatatttatgtaaataaatttataaatatattcaaatgaaatacaataaactgagaaatcaaaacctaataattatataatttttgcaagtcccttcaaatatttctaacaaatccctaaaaataaataatttaaataatacaaacaaataaactctccagcgatagaaatgca

SEQ ID NO: 14068 - DNA, 628 bp, Gossypium hirsutum
tgaaattctttatcaatatctatcaataagaaggttggttttccaaaagtgatgtgatgactaaaaccaggggctggctgggctgggcttacaaagaagccataaaatgacaaacatgcgattttccagtagggaattgcgcgtggaacatgatcatgctcttccattaacaactaatcccccatctttgtttattacgatttgaggagatgaaaatgccagttgagaagctttttgagattttgtttccaacgctgccgccccatttccatctggtttgtgatcctaactgttatattctgtgcttatgattagtggagtttatgaacatgggttcatgtgagaatatgcatccctatacccataacattaagcacgatttggtaccaaaatttatacatgtcatgatataaatacataaatatatgtccataaatacatgacatttattgaacaagtcctttgaatgatgattaaacaactctgccagtgcgtgcaagtctggctcttttatattttctcaaggaaataggggccactatcactatttttattacacttcaaaatgaactcatctataagtaatcaccaatttaatttcttctatgtttggtcaaacacaccaaat

SEQ ID NO: 14069 - DNA, 680 bp, Gossypium hirsutum
cttgttgcagccacttaaatctcctctttctgattcgagtatttggaaacattgtatttattatttctgttattcattgaactctggttttagccaatttttgctgtctgtcagaactgataatgcaagttttagtttgtctccaactacagcattgtctaactgcatgctggtctcaatggattgatcacataaaagcttacgccttattcctgataaaggcttcaatctccagactgtagcctgtaggtaacatcaaatactatacaataagaaaatgaacaatagaatagctagacttcaattcggaattgagctaataaggagttttacgttttacgagattttttatggtatatagaaaggcttactatttaatagaaagttataacaaagaaatatgtgaaaggagtgcaggagatctatttattcatttctgttccaatgtcttatattcttttgagaagtaataggatttgatcgtaatagattggataaagggagtacatagcttattcattgaatgaagaaggtaaattcctgggtgtaagagttttatttcgttgtagtatagaatcctttctgaaagacatccattcttgaatacgaaaatgcctcttttcttctaatgtaccacttaaaagcctcaaatcattaaaactttcaattgctctgcatga

SEQ ID NO: 14070 - DNA, 635 bp, Gossypium hirsutum
ctttatatcctttcacaaactatacattgcctttttggagggttcaatttgttatatcatttccgtttaaaaccatacataactgcacttcccctctcatactcttaccgttctatttctattacttttatattaatttccttcatttaaaagtaataaaatttatttgtcagtttgattagtattaatattattgtcagtgaaagtatattgaaacgtattatcctcctattaagggttagagatgggttatgaataattctaagcattgtatcaaaaagaatgatatgataaaaatttataatgagattaatgttaaaaagtgatgaattttattaaatatttattaaactaaatcctatacacacttgaatgcgttaacgctgtggaacaaatcaaataatgtttatatccaattatccgagtatatatatatatattgataaaattatgggagtatatttaatttcttgaattgatttataatgataaaatgcatatggtgataatgatttttattaaaagaaattataattaatcattttcggaatgaaaaagcttaattggtaatataggtagattgattctttggtggcaaaattttgaaaattagacaacatgtaatgagagcccct

SEQ ID NO: 14071 - DNA, 669 bp, Gossypium hirsutum
gtttccaagttgccacgaaattattcgtaacaacatgaacatagttttaataattctaagttaaagaataaaattgatctaacacattcatgtcatattgattaaaaccatttttagaaatcgtacatttggagttttattttcttagttaaccatttagttaatttttattttttatatcacctctttcaaataaatatgtttttccttaccaaattgtttaattttacatttcataaatattcacttgtatagttgctgtgggtacaataacttgtcatacttgtcacattattactttatatgattgtgtatacttgcacattttttttgttccaagtttttggcgttgttgccggggattgttattctagtcaattatttgtgaaattaattatcttgcaatttggttcaattttattttatttttactttaataagttttcattattatttaggtgataatggatcctctacaacatgttcaaggaggagtgtttgcttgtaatgctcacaatctgatcattgtttccaatgatagaaattgtgccactcgacaatatgccgttcctctattcaacgagctcaatccgagtattggaagacctgagattgaggcacaacaattagagttgaagccagtcatgttccaatgctcagacaataaaa

SEQ ID NO: 14072 - DNA, 678 bp, Gossypium hirsutum
aagttgaaactgaagcagacacagatagagaaacgaaagttttgcaattggtgggatgttttttaacggcaagtattgttcattttccaacaatgaggagtacaatggcaaatttgtggcaccccgtaagaggagttcagattagagacctggggaaaaaaaggtatttatttcaattttttcatttcttgaaagggttattaaaggttcaccttggactttcaacaatcacttactaattcttcataagttacaaaaggggggaggatcctttaaagatcccattaatctactcacctttgtgggttcaactatataatgttccaataggttttgtctcgaaaaatctggcaattcaaatgggaaattttataggagagttcatggaatatgatggctcaagtctgggaaaagaaagtagaaatttcatgagaataagggtcaaaattgatataaggcgccctttgaaaaggaaaaagcagacaatgtgctaagtgttcatatgttcgatttaaatatgaaaggctatcacttttttgcttttattatggacgtttgggccacactgattccttttgtgaagaaaggatgacggaaggagtggaaactaaaaagatgggatgggacttaactcttagggcacagtctcatcgagcccaaatgatgacaagtgtatgg

SEQ ID NO: 14073 - DNA, 653 bp, Gossypium hirsutum
agaaactgaaacgagaggaacagagtagataattacttcaaagtataagcaccaccagctttaactttcccgcaatccttgcagccccagattcctacagcctttctcttcactgcatactgtagcagcagagcttattagaacaaagacatgcaacagatgatgagcaaaaatatgaacataagccttggaactcagaaactataggatcaaacaaaaccgaatgccatacctttccacagaactcgcagaagtacttgctgtgttgactcacctccatcttcttaatttgcttcctcaaactggcaccataacgggtaccttcagtaacagacaaaacaagaaaaggaatcagaggggaaaacttcaggtattgaaatgccaaaaatcccattttaagttagaattgtttcgagaataaagctacaatagttgaaaatttaaatcaatttagataaaaatcagaaaggtaacagtttccaacattcaaatagctatcaaataccatctttcatacaatatcgatcctttctacgtagaaattctgtctagaaaacaaaatatgaattacaaagataagacttcataaaatcaagtagcacctaccatattttccaacaattccggccttcttcgttctctttgtctgcaca

SEQ ID NO: 14074 - DNA, 698 bp, Gossypium hirsutum
ggaagcttgttgagcaaatacactgaagtattgactgcctcaacccaaaacttgcttggaagtttgctttgaaatagcaaacatctggccatatcgattactgttctgttcttcctttcacaaactctattttgctaaggagtatagacatttgtgagttgatgatgaataccagatttcttacacaatttttgaaatatttcaaacaaatactcactcccattgtcagtttttaaggccttgattttgccacctgactggttttctactagtgccttgaatctgccaaaggcatcaaacacctcagacttctgtttcaagaagtaaacccagcaaaatctagccaaatcatctatgaacagcacaaaatacttgttctcattcaaagaaggggacttcattggtccacaaacatcagaatgcaccaactcaagtctttctcgagctctccatgcctagttcactggaaatggcaatctagtttgcttaccaaactgacaaacatcacaaacagtgtcccttgccttaactttggacatatcctttactagattcagcttgtgcaatagatcaagtgatctaaaattagcttagcctagtcttctatgccatttgccagcattattagctaagcttgtataagctttcttctcaagctaatttacatcaagcatgaaacatttgtctaccatgcctac

SEQ ID NO: 14075 - DNA, 590 bp, Gossypium hirsutum
aatctgcttggttggaatccattactatatgaaaacactgttttaaactgtcaggaggtgtcacactatcacaggttataaaatggcatggatagctagactcacatacgctatgttagtctgagaattgactaaatcgtagctctgataccaataaatgtaacacccctaacctgtatctaaatccagaatagggttacggagcattaccggacttataacttaatcaatcaaacaatttcatattcatttctcatacaaaacaaaaaccattcaaattcattcaaatagtccctaatacgagtgcttgaggcccaaaataaacagtaaaaatggttcgggactaaatcgagtactcaaagaattttttgaaaaacattaaaaattttcaaaggtacaggggacacacacccgtgtggccaggctgtgtggacattcaaaatggggccatgtgtccgtgccctaccctatgtcccaactagtgagcatactgacttgggtcacatggccaaaccacacgcccgtgtgttaggctgtgtgctaggccatgtgaaaactggagggtataatgacttgtacacatggccaag

SEQ ID NO: 14076 - DNA, 405 bp, Gossypium hirsutum
accgagtagaaatgtcaacaaagatattacagtcccaagttgaaacaataagtccatgacaggattttgctcatcctgtatgccaaaatgaatgcataaatactctatgttttgctcaaattgaactgcatcaataaaagtcattgtttccttattaattaataaagcaatataaagttttacaaactaaaattgcactgcatcaataaaagtcattgtttcattattaatcattccatgagcttcaaaacatatttccaacaagcagtgatgctaaattaccagaagctagaccaattttaattagttgttttctaagaaatccttattgtttaaataatcattagctatgaatcacggacatctaatatgggtgcgatacaatacaaacacagcacaagaaaa

SEQ ID NO: 14077 - DNA, 565 bp, Gossypium hirsutum
aatgatctgagttggttgactgtgttttcaatgcttactttctaactctcgttcggacgctttcctctgttatctatgcattaggaaaccattaagcatttatttctcaacattaatctatcttaaactaaaagtatgtactggtattattgataaaatgacatggtagatgactattctagcctattcaaaactcctttaatcctatcaggagctgtattgtttttgtctgttgttgaagcagattattttggtattgcagtctggttttctgtgcctgattgcagacaagctaatcaagtcagagatatacagcgactatgtccaagtatacatcttttccccgaggcttgttaactcgtacactcatctttcttcatgattttgaggaaccatgcaactttcaacagtttccagataccttgttacatttacttatttctgattgccattttgcaggctcatctggctccaagtggttatctaaaattaccaaatgtgagtagcatacactaatggaatgtttgaggcctttgtactgcttgcactggttgtacgactatga

SEQ ID NO: 14078 - DNA, 758 bp, Gossypium hirsutum
  misc_feature (610)..(610): n is a, c, g, or t
  misc_feature (635)..(639): n is a, c, g, or t
  misc_feature (641)..(641): n is a, c, g, or t
  misc_feature (659)..(668): n is a, c, g, or t
  misc_feature (671)..(673): n is a, c, g, or t
  misc_feature (675)..(680): n is a, c, g, or t
  misc_feature (689)..(692): n is a, c, g, or t
  misc_feature (697)..(699): n is a, c, g, or t
  misc_feature (702)..(712): n is a, c, g, or t
  misc_feature (714)..(716): n is a, c, g, or t
  misc_feature (726)..(742): n is a, c, g, or t
  misc_feature (745)..(747): n is a, c, g, or t
acatcgacaaccaccatcacataatctttagacattacatgcatctactatacatatatatctctctttcatttacaatccattccatgcatttaattcatcttttactattgttgatacaaggaggatctcgtcgcggtgagggtgagccgtagaaaaattaggctgaccggaatatgaaggttttagagaggattagagagaaagctagaggagaagatcggtctcgttttatggttccagaccagagttagaaaagaaaatttggggagaacaaaaatgaacaatgaattttttgaagacaaaatacaattttatctttatattaacttgggatttcataaattttgaagggactaaatggttaatttaccattttttggggagccaaagccaccgcctgcatcttgtctttgcccttgttccagacaccttgaaaagtaactgatcgacctactaatgccttgtcgtcatagatatgaattgtcaggaaatgaatatacgtgaatggcgcacatcatgctcaagtcatgcatgtagtcccaatgattcaggctcgtaagatctcaagtttgtaaagttttgatctcgtgggtgtctaacgcacaanatgattcccttaatctgacgcattnnnnncncgggcacaagaacataannnnnnnnnntannntnnnnnnctttcccannnncttcnnnttnnnnnnnnnnncnnntttttttttnnnnnnnnnnnnnnnnnttnnnccctttttttt

SEQ ID NO: 14079 - DNA, 670 bp, Gossypium hirsutum
  misc_feature (7)..(8): n is a, c, g, or t
atttcanngtgatcgatgatccgcctgtgtgtgcctaagtttttccaaagctctactttactattgctgaaaactgaagtaacccttgtgaatgttttaaaagctctgccaacagagataggaaagcgaagtatctctcttgcatttcctatgacaaaaaggaaaaaaacaaaaaaaatccttcacctttagcttttggctaattaggccggatcggataggtcgatcagattgattggattaaaaatcaatcaacccattgaattgaaataaaaaatcaatttaacccaattttttattttttaaaattttaataattttataattaaactaaaagaatcaatcagattagtgcattaccggtctctgaacttgataattaagtttattttgctatctttatttttttgtctaccttcaaaccttaacttgacaattaagttcatttttggtccctaatattagattccattgaaatttaataatatgatattttaaaattatgccacattgtcacattaaattatattgttttccttaatttagtacctaaagtcacattaagttaattgattcagtctaatgacggtaacactgttaaaaaaattgattgagaggtggtgcttattagaacatgccacatgacattattagtcaattaaaatgtgac

SEQ ID NO: 14080 - DNA, 641 bp, Gossypium hirsutum
gctttgaagtatttggcttctggttttgtacttgatgaagaaaggtcgatgactgatcaaagttagacttttatggttatcctgaaagtaaggcctgatgatgattagaatatatggtaattcctgtatacaaacgtgtaaaattttatatctcactattctatttatatttcaggcttcatacttggccgtgaaaagtactgggggcaagcttctagtatttcagtcaggtaagcctatatacgtacaaaacattttcgtgttttgagatgtatataaaacagttcttacctcttataccataaaagttgacgtatctttttctacggttctctaatggatgtgtatatatataattttcctgacagtcatgccgtctgttggcattggtgccctttcttctagagaggctgaaggaagaactaacatatctgctggagaaaaggtttgcagatctttttaaaattgttcactctctatctctgcattttattgaataatggtgcattatttttttatttcttttaagcttagaatagttgttcttttagggaagcagttatccctgcacagttacattcaaaaatgtggaaccttgtgtttgtttgtctgatttctgagttatgactgttgcatctcat

SEQ ID NO: 14081 - DNA, 572 bp, Gossypium hirsutum
gaacaacagaaccgacaatgaagaaatcaagttagtttcggatctaattgatatcacaaataatacttcgaaggcggatttaataaacaatacctttcaagtggacatagctcagaaaattttgcagattcctctagcgaaaacagttcatgatgacttccaagtgtagaaaggagaacccactggtgaattctcagtttgaagcgcctataaactattacaagatgctaacttgggtcctagtaattacttaataaaggccaaaattaaggattttacaagaaactatagaatctacagctaccataaaaaattacaatcataatatggcgaagttcctggaactacatccctaccctaataaatctcagacataaacgagtggccacgaatgttatatgtcctctctgttgtacttggaaagaagatagttatcatgtctttcaacaataccctacaataatagaggtatggcaaaatttaaacctctcttgggtcataaataacacgattcaaagcttttgagagtggcttacctaggttttcgagaggggtacttgcaaacagtgccg

SEQ ID NO: 14082 - DNA, 603 bp, Gossypium hirsutum
  misc_feature (536)..(536): n is a, c, g, or t
  misc_feature (541)..(541): n is a, c, g, or t
tgtattctctacttgtttgtaacaggaagtagaaaagaaaactaattgttgtaagcttttttatgcgtagaaacaaaatcatattaaaaacaaggaaaaacactcgcacaaacataaagaaattattctctatcagctcaaacccaaaaaataatacctaaaccaggtaagaccgaaaaagatgaattggtcggcagcacaacttcaaagctatgacttcaactaactacctatcactcatcaactaccattcccaagtccgcatgaaacaaccacctaaaaaggtgtaaggactaatgcaatgactgcttcagtcacaatcatcattgtccgctacctcgctattcctcaatctgtaattcactcaaaccaccccttttcttttttttggctaactttattgcttcctccttactactctgttttcatgccctgcttttaagtttgaaaatggaacattcagcagaccatagtcaacatgctcctcctcctccttcaacagtcgcctctctcccttcttctgctagcacagaagnccggnaagaagaaagtaatagtggccaacgcctgctccaccgccagcatcgccaagagcggcgacca

SEQ ID NO: 14083 - DNA, 561 bp, Gossypium hirsutum
ttttccccctcacaattggggagtaatacaaccacagatcatcttgctcatttaacaatgcaatcttgaaggaaaaactttaggagtttttcatatgcttttttgaccgttttagaggatgaaaaccaaaagaaattccacatgaagaacaataccataagtggttctgaagttcatttacctcaccacaataaacaggagattccacattcgtgctatgaacatttattttaggacagccccccaaatgattttttgtaaaaaaaaaaaatgaaaagggggaggggtttgaagagttttgcacttcataagtgaaagcattttttgtctttttgcccccctttccctttttttaacgtttgatgcaacgggaaacacacaaaacaaaacaaaggggtaatttatgattcctctctgccccccccccctcaaagaaattttccggctttgcccctggaaaccataaagatagcaaatactgcacaaatagctaacgtaggtacctgaagaactttctttaagtagatcctcatcagttttccggaaacctaaattaacaaa

SEQ ID NO: 14084 - DNA, 640 bp, Gossypium hirsutum
caataacagcccatgaattccatggaatttcataatttttccacaaattcaatactttttcaatttaatccctaaaacatgttttcatccaaaattctttaataaaatacctttaaacatccattaacatctcaatttcatcatcaaataacaaaaaccatatgaacttatcaatggtatcttccaaaactttcaacaaaatcaaaaactaatagaataccaagttggacctaactgtaaaagtccaaaaatataaaaatttgaaggaaaaaaaagaaaaaattgaacttacttgaagctagaatatgaaagaccaattcaaaaccctcttccatggttgtgtttgactgaaagttgaagaagaaatggtcttgaaatcgttaaaataaattttggccacataaactttattgtaatttcaattttgtccttaaatacataaaaatctttgatttcttttaacagtatgccgcctcagccacttaaattggtccatttactcttttagtccttccttatttaattatttgagctatttaatcattttagtaaattttgcatctttttaatttagtcttttttaattaattgtctgccgagtagtttgggaagaacaaaacaaacccaccgattataactt

SEQ ID NO: 14085 - DNA, 624 bp, Gossypium hirsutum
  misc_feature (184)..(184): n is a, c, g, or t
atataccctttggtaactatatttcacgctaatgttaatttggtacatgagtttaacattatttgtgataaaaaataataataaatatttatgcatttgtccaattaaacaaattcaataaaaaataataataaagattcgacaaaaaaactcgtgtaatggttcgatggttagagatgaccanattcggagtcgtgtttgatgatcgggttttgccttataatttaccgaaaaaatattatgtttacgttgatgattagaaacatgtggctgttgctgaaaagaaagaaacgacttctgaaagccctgatgttgagattcatctgtccaaggaggttgctagaaaatccacttctcatatgcgtgaagaacgactttaaactcttattcaagttgcgattcaacaaggtaacccaattcccattttgtacaagaaactgttgttgatatggctacccagcaaacatacaatccttcatattttactgatgaactcattaccaatatcactgaacttgatcctaatcttgttggtgatacaaccgttgttggttctgagggacccaacatcattaccggtggttatgaaaatttggagataggagcgaccactggtataggtac

SEQ ID NO: 14086 - DNA, 674 bp, Gossypium hirsutum
gtcctaacaccggatccttttgccaacaaaaggcttcccatatcagcgaatccgccacctttttccggtcttcgtcgctgttggcattacggactatcttggtcgcgttgctaacaccgaaaaccttgtgcacggcttggaattctcggcacttatcggccgggaaataaggcgccaaaatgcaattctcatcgcattttttccgttgatgcttgcatgcagcgcatgccggatggactcgcgatgcggctgccgctgctgctgctacaccattgctagtttctctttgcatcctaattttaagatggtataatcaaatttatatgaaagtggaaccaaataatttaactacatattaaaatacaagttggattttacattagacatcatccatcttatacatatcctaatatattaatggaagatcaaaatgaagattgaagaagtgaataaataaaaaggaacaaggaagacatgaaggtggtaaaatagaaaatacctgtgggggaagggtataaatatataaagttggtttggaagggaatgagaaaagtgatagtgaacataacataaataataaatggagcagaagaggatgggcaacaattaagaggtctatgtaaggtgcacgaaaagattgtcactttgaattttgggatgagtttaggtgactc

SEQ ID NO: 14087 - DNA, 594 bp, Gossypium hirsutum
tgttggatggtatatgatttagcccttgttttaaaaaataaaccacctcttttttttctttttctttttttaaagatatacataccctacttcaatcattaaaataattattaatattttctgaataaattaactaaactattttcatatgatattataatgcaaatattcaattaaaactttttttaacttaaactgtaacatactaaacggactcaattataattaaggtttgaatcacaattatataaaaaaaatattaaaaattctaatatatttagatttttaaataaaaaattaaatctcaaaatattaagagattacttcaaccaacacccaaaacgaattgaattgtttctaaagtcccttgtagcggctgaaaatacaacaacaataccatcaatcaatcaataaagcactttaattgctctgtgttgacaaaagtaaaagtggtattaaatttttacatatatccgcacgttgtaacatcaaatttcatttttaatgccatgagaactcgttacactggaatctttggtaatcataataaatgttcacagaaaaaagttcggcactaaagcatttactttcaac

SEQ ID NO: 14088 - DNA, 737 bp, Gossypium hirsutum
gccagcccttgagctcctagaagcggccacacttccactcacataggtagatcccatcaaaagtgttcccgtaattataacactctaacatatttatgttatgggtccattaagagtacattactcatccttcccttatcattacgggtacctagcactttaatcttaggatggatttatttatagtgctaacagtcacatactaatgatgtactttgtctcattgaactcaagacttgacgttataccaagcgttgagtcgagtttccatcatgggtgactctaattaatgggcttgagtcccatcccttttgaggtcctttttactgcatctctagcaagactttttgtcaaaggatctgccaaattttcacttgacctcacataattaatagtgatcactccatcaaagattaattgtcggacataactatgtcttaatccaatgggtctagactttccattatatacttggctatatgcctttgctagagtagcctcactatcacaacggatagaaataggtgaaattggcttaggccataaaggtacatcataaagcaaatttcttaaccattctgcttctttagatgcagcggctaatgcaataaattctgctgccatgggggaatcagtaatacatgtttgtttcttggaaccccaagaaatgactcctccaccaagaatgaaaatccacccactagtagatgcatgatcttccaaacttgcaatccact

SEQ ID NO: 14089 - DNA, 610 bp, Gossypium hirsutum
  misc_feature (384)..(384): n is a, c, g, or t
tgaacgagcaccaatgggggtaaaagtcgcctatgatcgagaggtcgagaacatcgaagcggatcgtatggtcagacgtaagtactaccgaccgcggcgcgaatacttagtccgatggaagggattcccggatagtgagatgagttgggaacctgctgaagccttgtggcaattccaagacaagatagatcgataccatgcagaggacgcgacgagggcgtcgctagatttggtgggggagaatgtcatgggttgcgcatgggagcccgcaaccatgacacatctgtgtgaaccatcaagaaggaaggaggtcatttggcccaatcggaccggcccgttgcttgaagagattgaaggcccatctacaagttagacaaatataanatattattttataagattacatatcttagataagatatgtaatcttagaagatatgattttatattcttaaaggtttggtggtaggtgccctttaatcatagccgttgatgtacttaattttgcaccgttggatttggggaggctcaactataaataagagacctcttccctcattgtaaatcacttgagttttgagtaagaagaatccttgagagcattcactca

SEQ ID NO: 14090 - DNA, 659 bp, Gossypium hirsutum
attaaatttaggaatgttatatgaactataaaagttatatttaacttctttctcatttttatttcattttcaggattcacttggtggaaacagcaaaacggttatgataggtaaatccctaaacctaaagcatactatataaccttgtttttagaatatattctgtatggatttacatatatgaagtcctgtacacatcttgatcatgctatttcttacttaagattgccttgtctgcttgcttgttaggccaattatcattgtttactatttgtcaaccttaccaccggtattaaaatctaaaatgcaatgatcatattcatatattttatgggttatgaatcttttcccttccattgtgtcgattatatattcttgaaaaacctgtatgtttctattctgcttcagggttcctattatcatgttttttcattcttgatctctctattctgtatcttgcttttggtaacatgttagtgattattcctcaaaatcttgattttggttgcttatattcttttgttctccgactatgtatcattgtaaattttttatttcttttccagcttgtgtaagtcctgcagacatcaatgcagaggaaagtcttaatactctgaaatatgctaatcgtgctcgcaatatcaagaataagcctaaaa

SEQ ID NO: 14091 - DNA, 653 bp, Gossypium hirsutum
taaaatactgatgatttttcaaaatttacgctttgccccaaacaggatttatattcttctagaatttcctgaaaaatgatagcacccttccttgttgcctccccaaataatatgcaatcatcagcaaatagtagatgggagacccgtggtccattcctgctaatcttgataccttttgaaatacctctcttcattgccaatcttaatggactcgacaagccctctccacacaaaagaaataaaaacggacttagcgggtcttcttgtctaagacctctggttggcaaaaaattcactcctctaaacccgttaatgattactgagtaggaaactgaggataaacatttcataatggccttcacccagttaaggtcaaaccccatcttgaccatgatttcttcaataaaacaccattcaaccctatcgtaagctttactcatatcaagtttcacagccataaaaccttttttccccagtttcttctgttttaacttgtgcagtacctcataggctaacaatacattgtttgatatcaatctccctagcacaaaagcgctttgggcttcatcaatacatttcttaataactaaccggagcctattagcaattacttttgctaaaattttgtaaagaacattacataggctgatcgg

SEQ ID NO: 14092 - DNA, 624 bp, Gossypium hirsutum
  misc_feature (200)..(200): n is a, c, g, or t
tattgcttctttaggaactatgaaattccatttggctgatgagaaagcttatcatctcaaagtcccctataatattcttgttatggcttttttgttctctgctgtgcattccagaagccataaaatcataatattttccttttcctgataacgtcaggtatgtgaagtctcaggccgtgacatgcgcatatttttaccancgagtattttatacatcatggctgaattggggaagggcttacatgtatcaagtgtcatggactaccatcaaagattttgatgctttgactatgtgaaacaaggtggttcaatctgggtagttgtgccataccatttttgtaatgtatttcgtttctcaattaaggttggggtacatttgagaacttaaatttcaaaaattagcgtaacttgtttaataaaaatacatgtaaatgttgattattttttagatgtaaagatgtgtctgatgtttttttatttttgagtttaaatacttatctactatttatgaattttgaaatgtacattttgatacctttgaagtatataattgctttgaaccttaactagcacgtacacaataaatgcatgaatatgggagggcctatcataaagaacatgcaa

SEQ ID NO: 14093 - DNA, 641 bp, Gossypium hirsutum
gggttgtgttgtgacacacccttttgcagccgaggaagtaaacagaaatcataatgtgggataaattggattttatgattcaacttaagttatcattaatgcctgccaaattatctccaagcattccaagctaagcggtgaaaagaggcatgatagaaatcatgcgtaagttccataaaagtcaagataaaagaaaagaggaaaaaaatataagacaaagagagggatcttatttttactttaattcttaattttaattttgattttgattttgttttctccctctgcatgttattggaaaaatgtaatgtcatagtccgcttttatgtacagaaacgtaaacgcaaacatagtccctttaatgggacttaaatgaattcctttaaaatatagtacttccttgttaaaaaatagttgaaatggtccaaaataacatcatgattgatccgttagcttcaatatttatacatagcaaaagctaataaatcctaactaataaaatctaaagaatcccaacaaaagaattctaaaaaatataaagcaagttcaaaataaagcttaaagatccaataattaaaagactgagttaacagatacagtgaaaggttgttttaggagctttggtgggtatatcgacaact

SEQ ID NO: 14094 - DNA, 619 bp, Gossypium hirsutum
tagctcgttaaacgagcaatttcgggggaggaagacgaggatttgagctgggatattgatgaggacgatgaaggagtagagggtggaaatgttgatagtgagaaaaaggagcatgatttgcgtgaagatagtgaggaatgttcgaaaaaggatgaggataaagtgagttcgtgtaaggatagtgatgtttccataatttcgacccaacattcaatggctgaggaggaagggtgggatgagattgaggagattcggagtagtaacgacaataaaggggacaatgttgttgggagcactagtaggattgatctatgtaagcggctgagtgttgcagaggaagaagaggatttgacttgggatatcgatgacgaggaagaagatcagcctgttaaagcttgattgaatacctgtagtagtattaatgattcttttaagatagttttcgtttttaattgataagaaacttaggttcttgtaaggatagtgatgtttttgtagcatcaagccgacacttgctgccctaggggctaggaggaagggtgggctgagatggaggagattcgtagtagtaatggtgataaagggatgacgtattggtagcactgatagggtttatccg

SEQ ID NO: 14095 - DNA, 636 bp, Gossypium hirsutum
tcgtctttaatatgggtgcggggtattgtgatgttgctgtagcaggtatagatgggggagttactgagataaaagccttacttggaagtgaaatcggaggagaggactttcttcagaacatgatgcgccatctcttgccgagttttgataagcttgatatcaatcaagtcaatggggttacttcgagttgcaattcaagaagccattcacgagctctctttccaagaaagtgtacaaattgatgtagatttgggtcatgggtcgagattatgcaaggaggtgaaacgggaggaattcgaagaggtaaacgagtatatatttttcaagtctgggattctcatagtccagtgcatgcacgatgcggatgttgacgtggaggacctgaccgacgtaatagttgtcggtggctgttcttgtattccgaaaataagaaatcttgtcgagaatttatgcgaacgagaaatttaccaaggaatgaacccgctcacagcagcagtctacgggacagctctggaaggagcgttaacttcaggtatcgatgatcctttgggcgacgtggacctgttaacctctcaagtcacaactctcggaatagggatacgagccaaccggtctgaatttctgcccgttatacct

SEQ ID NO: 14096 - DNA, 489 bp, Gossypium hirsutum
ttcatatataaaatgccgggttcgcaatcttagtagaggtcattactatatagcagtttggttaaattgtggaaaacaaaatgctgcttcaattactaatccagaaaactactctatcatcgcaatcccagaatcttcagtctatttcaaccccaagaataaaactaaagcctgagtagacaattccttgaatctgtcttatgccacttcctcacaacagcttaaaataaaactgttatgctatgcacataacaaatggctatactttggcctttttcaaagcagctcaaagatttgattacaagacttaaacctaaagctctgaagttccaatcttgtgtaggcagaagacgatagggggtccatgtgtacaaaaaactagtagcgcctccctccaaatgttctggttttcattgaattgcacaaactttagaagcaagccagtagttcatttaattgaatgtttttacttcataaaaagttggtttt

SEQ ID NO: 14097 - DNA, 625 bp, Gossypium hirsutum
  misc_feature (558)..(562): n is a, c, g, or t
  misc_feature (579)..(580): n is a, c, g, or t
  misc_feature (583)..(584): n is a, c, g, or t
  misc_feature (589)..(594): n is a, c, g, or t
  misc_feature (605)..(610): n is a, c, g, or t
  misc_feature (616)..(622): n is a, c, g, or t
ttctaaagaaagtttcacaatcctttatataaacttaaatataagaaaaactcaaattataaggaagttttatgttaataattgaattaaaattttgaaaataaaaaacaaaaaactaagggtctgtttgattgtcagtaaaatattttccgtaaaatgatttctggaaaatattttacttttctgtaaaatgatttactagaaaatattttttggtgtttgattgaatttgtgtaaaatattttctgctgcttggcagattttgaaaatatttttcggaaaagttgtttttacatatattaatatatattaataattttttatattttaaattatttttacttatattgtaatgatttatttataataatactcaattattaagttacaatattaatcgttataaattgaaaaaactaatatcaaataaattatttgtaattgtgttaaaaaacaagtattgaataattaaaaaaaataagttactggaaaatcgataaacagaaacagttttctgccgaaaatgaaggaaggaatgaatgaggcgatagagagatnnnnnttttttttttttttttnnctnnttccnnnnnnccccttttccnnnnnnctttcnnnnnnntcc

SEQ ID NO: 14098 - DNA, 698 bp, Gossypium hirsutum
  misc_feature (38)..(40): n is a, c, g, or t
taccaagtaccaatttcaaccactgggttcttctactnnntggctaccaagtaccaatttcaaccactgggttcttctactcaaattggctcaaaccaaaagaaacctaaactcaaaatgaccccaagtggtaatatccaaaccccaaaaaactaagcttcaaacctaaatgagctcaagtcaaaacaacccgaattcaaacccttaagttgaagtaaaaattacccaaacccaaaattaatccaaaaataatccactcaattgacagggctaattgtactgcaatgaattcaccatgcaaacaaatcaaattaacagctaccctatagagaaacaaagttgaagaatcttcaacaaacatcatcccaatggatgatgatcaatgtcaaccaacatcatccacagttaccaagtaccatccttaaccatcggcttcttccactcgaattggctcaaaccaaaagcaacctgaaccagagataccatatctcgaaatgatcccaactcgtaatgtcctaacccaaaaaactaagcttcaaacctgaatgagctcaactcgaaacaacctgaatccgaacccataacaagttcaagccaaaatgacaggtctaattgtactgcaatacattcaccaagcaaacaaatcaaattaaaagctactctatatagaaacaaagatgaaatgttaccagtgctcg

SEQ ID NO: 14099 - DNA, 644 bp, Gossypium hirsutum
  misc_feature (58)..(58): n is a, c, g, or t
ttttaaagtaatgaaatgaatttttactatgagaaatcaaccaaaaaaaatcatgcgnttatcttaataatggttgttaacaacgttattaatttgtatatactaatgacactatgaaaaagggtcaatctattattttttgtccctcaattaggtggggtttgaatggatgattgggtgcggtgcagtgcgtttaatttattttttgtttcacgctacagtatctaatcgcaccactaccgttatttttacactagtcacaggtaaacatgccgctcatccaaactgagccttaggataacaacaaaatggtgctttgagtgtaacataattttatgtaaatttgtatatatttttctttatcagcctgaaatgttatgtctctataaaatattttggattttggtgtaattttatttgattaatcgaaaattggctgaattaatcgaaattattttagtttatttttttttgtttggctaattcaattaacaaaatttcagttcatttaaataaatcaaattttctaattcatcactatataaataattttatattttattgatgaataaagtgagacaactttgtaaactatacttaaaaaaaacaaagggaataatttaatattttttattattggcatt

SEQ ID NO: 14100 - DNA, 673 bp, Gossypium hirsutum
  misc_feature (629)..(631): n is a, c, g, or t
  misc_feature (633)..(634): n is a, c, g, or t
  misc_feature (643)..(645): n is a, c, g, or t
  misc_feature (647)..(650): n is a, c, g, or t
  misc_feature (652)..(652): n is a, c, g, or t
  misc_feature (654)..(656): n is a, c, g, or t
  misc_feature (661)..(664): n is a, c, g, or t
tttaaactctcgttcaaggtggacttaaataaaaaaaaatattaaatttgaattcaatttagtccgttaatattaaattttatacttaaataacactaatataattataacttagtaattaaatatatttaaaataataataaaattaacaattaaacaaaaattatataatatctaaatagtaacaataatataataacggaatggtaataaaacaacaacaaaataactaattggagctaaattggagccaagtaaaaaaaatcctacccaatgcttgacctatttaaaaaacagatcattttattttcaaaactatatttttatttaaactctttcacttttcaaaccaaccttcaaatttaaataaaaaaccaatcataatcaatttagcagcacaaaaatcaacttttaatacttttatttttctcacaatcactgttaacctaatctctttttaactatgcttttgattggcttaaacatcattgtgccttaaatcacatagagtgacggttttagagagcagatttggtgtgtttcaacatggaagcctcaaatttaattcatccacctcgaggagtagttgtcttcaccatcataaacgacctaaaaaactctttcctccnnntnntcacttttnnntnnnntntnnnctccnnnnctccccccc

SEQ ID NO: 14101 - DNA, 612 bp, Gossypium hirsutum
cactcatccaactttacactctttgtaattaagtcattttcttcaaattcactacagaaatatttttcaattcactaaaagaatacaatttcactttcaaataatttctatagttcaaaatatcatttttatatatactaataagtctaatgagtattattagttttcatttagggttttaattagataaagtaaaaatatttttgtactttcaacaaaatgcttgggatgagctattctctctttatccccaatttgttctttcacttctcttcatcaatataacacataacacatgtagacaatattaaaacatcaatataataatcacatactatttctatgcatttaaaacgagataattataaaattttttaaaaaacttcatcatctataccttaatttctctcaaattcctaacttctcttttatctcttcaaatatgtaatttagctagctttacaagtaatttatcatgccatcgagtaattttactaaaaatctataaaataaaattagaatttaaaacttgaaagggttgaaaatggaggaaaaaagggaaaatgaaacttgccaaagaagaggaggaatgtgacgtgaatgtggtatgaa

SEQ ID NO: 14102 - DNA, 615 bp, Gossypium hirsutum
gattttaattccacgcctgcctttgtcattgtcattgagtaggaaaagtcaatagtccaatatgtttctcttccttcaaaactaacgtctgcctttaagtaccttaacttgccaacagcaacaactttcatggccttccatatttggaagtgacgagatggcaaacaacctgtcaatttattgaaggaaagatcaagaatttgcaactttgtaaactcattggattttggttctccaattgcaccatgaaatccattatgtcgtaggatgagaattttcaactcttgaagtcttcccaaccaagagggaaacgtatcctatatttgattatttcccaaattaagaagctctagcatgttgcagttaaccagtgatctcggaatacgtccattcaattgattttgactaagatcaatcatcttcaatgtgtttcctttttcacatgctcgaggaatagggccactaaagttattgttttggagatttagtactgaaagtgattcgcttagtttgcccaaacatggtggaagcatgccgctgaagctgttatttgataggtcaagtacagttatagaagtcaggttgcatatccctgatgagatttctcccttgagt

SEQ ID NO: 14103 - DNA, 738 bp, Gossypium hirsutum
  misc_feature (609)..(624): n is a, c, g, or t
  misc_feature (626)..(637): n is a, c, g, or t
  misc_feature (639)..(641): n is a, c, g, or t
  misc_feature (643)..(648): n is a, c, g, or t
  misc_feature (655)..(655): n is a, c, g, or t
  misc_feature (659)..(664): n is a, c, g, or t
  misc_feature (666)..(666): n is a, c, g, or t
  misc_feature (668)..(674): n is a, c, g, or t
  misc_feature (677)..(720): n is a, c, g, or t
  misc_feature (730)..(730): n is a, c, g, or t
  misc_feature (735)..(735): n is a, c, g, or t
ttttgttacctggtgatgagtggagcagatgtgggagaagtagctatagcaacaaaacataatccaacatctaaacaattagtttctaataaaaataatgaaaaattcaaccatattttacacaaaaaagttagaaagtacaaagaatatgaatcaataattgaattaaaaaaaaagaaaaaataattaagaaattattattttaatttcacaaaattttatatttaatatttacactaaaacattaaaagttaaattatcttatttatgttatattgatataattgtatggtttgtcaataataaaatatggtgagataaataattgaaataacattttaaatgtttaaaagtaaaaattaaggttgaaaaactaagtaaaggtaaatcatttttttttcttcattccaactgatctgtagcaaatataacaagaacagcatttaaaagttcaaatttatacctgttatcaccaaggttgaggccatttcattacctttcttatctgccatggaaaatacaacactacctacctcctaaattttcctcacaatatccacaaatgttgattgtagtgaccatggtctcatcgacttgttcatgctaaannnnnnnnnnnnnnnncnnnnnnnnnnnnannntnnnnnnttttttntccnnnnnntncnnnnnnnttnnnnnnnnnnnnnnnnnnnnnnnnnnnnnnnnnnnnnnnnnnnntttatttttnatcanaaa

SEQ ID NO: 14104 - DNA, 437 bp, Gossypium hirsutum
ctgcaaaggacttgtgcccattaaatggcttaatatttctctgccctttagaaaagtgcagaccaattgtgaccgcttcaagtaattcttcccattcaattgatatacggcttgaatgttctacaaatcttcggttgtaacagtgacaatattctcgaatgtaggggcactcgtgacaggactagtgattccaacagagcttttgggtgatttcgacatgattgattgaatggagaaatagatacaaacaatgcaattatgagagagaatggaacaacgattgagaggaacagagaagatagaacttggttgggtatgaccagagaaaagaatagaaaaaatttagagtttatcaagaaagagccaatagctctgatatcaggacaaaaatcataagagaagaatgaaatttatcatcactaaatcaggttacagcc

SEQ ID NO: 14105 - DNA, 432 bp, Gossypium hirsutum
gaaactgacagaataatgcacgtaaattttagtatcggggatgccattttgctggttttgtttttcttttcttcttctatgcgaaatgaaaggtatcatatcattcttttatagtgtgaaaaatggccagtcaaaagaaagaggatttgaaaagtgcaacgcagaaaatgcccattgcctttgcttgtttgtttgattcttctaatatgagatcatggaccttacgtgagtagccatttacatgccttaatttgctgctacaccattttctcattattcaccacgcaaaacagaaaggagaaagaaaagaatcttaacagtgctttgggattaatacattatgacggaggtttaggttacttaagcactttagctggaaatatattatttgttatttttcaatgctaaaatgagctccgtatttggatcaag

SEQ ID NO: 14106 - DNA, 676 bp, Gossypium hirsutum
gctaaattgtgtagggtttcaaattatataaagaggaataaaaatggcagaggaagattaggaacaattgaaaacgacgctccagatccaatccaaatgaagtttaatgaagaagccaaggttttgaaagtcttggatggaaagggcgcacccacttttaactcagataagtaaagttaaggaatatgggaggaaattatatataggatctgttttgaagtcatatgtaagcatcttaaatacataattgaaatttgtatgttacaactttttaattaatttttttgtttttatttcatatttattatacttgataaatataagttttcaattttatttttgagaaattgtatgctagaattttttaattctttttatttgcctaattgagaaattacatcttcatggctcgtacacaagaggaaataagctatgctacattggatacacaatttagttgaatttgacgtaccttcaaaagttaacaggaattagatgagttagtttctgatttaaccggttgaaccacaaaatcaaactcattacctttttatttaactggttgaacgaattgatttacaatttatggaatagatataaatattaactttcaaatatattatcggaattatttttaactttcatgtaattgatttcaactcggatttccattcta

SEQ ID NO: 14107 - DNA, 649 bp, Gossypium hirsutum
taaattgcatgacgatgatccctcatcacgacaccttttagggctcctcacaacaacaactagaaattttgcaaaaaaatttcaacgacttgcataggacactttgacactccattacacataccaattcatcttttcatgctaatgtaccaattctaacatttcatatagcatacattaatcattcaaatcatgctcaattacagttaaacatactttaacatactttagtattcaatcaaattacacaacgtaccaaatttgcatataaggaaatttaaagtgcattatagttccataccttggcatttggttatttttcatctgtccaagcatttaacaagttatttaagcacctatggccacaaagtactaaagcacatgcatgctaatcaacatatagcctagccatacatctagcatcattcatgcataaatccaaatgttaatagaaacaaaaaaccagttataaaagtccttaaacaatttatggaaagtccatttacaaaccaaaacaacaactaaagtctaatccctcaaaattaactcacattgccatcctttattttccaagaaaatactctcatacacaattgagttactttaccttaggatcataagctcactcacttctccattccacacaagt

SEQ ID NO: 14108 - DNA, 600 bp, Gossypium hirsutum
tgtagtcttgatgcgactgaatgaggttcctatatagagcatccaagagatgagtgtcaataatcatgcaagatttatatgtcatttaatgattaaattaacggtttaaataatgaaatgatttcattgatatctggagatagaattaaattattaactttaagaaaaaaacaaaaggaactgaaaattaatgaaaagaaaagaaaaagattacaaaacacatcctatgaaagttacacaaactgacattatggtcattttgggtattgtcaggaattttacataagaaaacccccccaatccaaattttttactccatgaaactaaacttggatgtttttgggaaggcaactccccatatatccattttccattgctttttcaagtatacccccataacttaatctaatttcatctataccccctccccctccattttttttaacattttgtaagcctgtttgaaaaatgtcttttagccatttctcaaataagctattcacaaaataacttgaaccaactaaaaccccctccagtacccgctcttcaatactaaaactaaccttattttcacccccaaatatctcctctaccaccctt

SEQ ID NO: 14109 - DNA, 611 bp, Gossypium hirsutum
aggagctgggattaatagtgtgagaagaatgccaagatggatcaagtggaaactattagagcaaggtatgtaatgcttaatacagagagcgcgatgaagagtattttcggtttagctttggcgggggctttgttatgtgattgggaagggaattgggttaggggtttgatcttaatattggaatgccaaacagcctatttgtggggactgagaaggtttgatgctgcttgagttttgaatatccaatctcttatagttgcatcaaatgctgctgtgatggttcaagttttaaggaaggggattaaggctgtcatctttgtttcgtattattacaagattgtatgcaaatcatgtaggcagggtggatttaagaaattctaaatatcctacaataatgtaataggtgtgcaaatggcttagctaattcggcttagaaatttaatccgagaactcatattttagataagcccccaattgaaatatgaaagttgttggaagagtgtatgtttggtgtagcaacgcttggttaacttgttaattagatcttatataccaaacatatatgttatattgtgatgcagttttccatgtttgtctttgtgtgttgccct

SEQ ID NO: 14110 - DNA, 665 bp, Gossypium hirsutum
ttacacctcctttgaagagcacctactggatttggaagtaaaccattgaatcttgcaccaactttttaatttaattatggcgattcgtattccaacattgacctgttaaatgccggtggatgaatgttcagttaggttactttctaagttgccatggaccatggttttctttctatcgtcttcactgttcttcgcattcaattaatttacctctatattctaccaccaagtaatgaaagagcataggctgtggtccttggaggcttgattcttataatcaacaaaatgtaaaagtcaatactaacatctgcaatcattttcttattctgaacatattacttttaaaaaaaatcaggggttaatcgatttagtttatatacaaatttagatgaagaaattgattttgagtctagcttgcaacaagtttatatgaattcaacatgtaaagtttttgattgttgtcgaaggagatcttccgtaggaaaaaagggaaggttgaacgagttaaatcaattttacaaaagaagaatggtgttgctaagtcataggatattgttaaaattaagtgaacgttcatgcatggccaactttgagaaaattgtgcgttttttactttacaacgatggcgatggcgatggccagcaagcgacattactaaaaaaaat

SEQ ID NO: 14111 - DNA, 599 bp, Gossypium hirsutum
  misc_feature (27)..(29): n is a, c, g, or t
ctatatttattaaaataaaaaacctannntcttaccataattaatttgccatgttattttttgaattactttaattaatttttaaatattttatttttcctttttcttagttaatacttttcacttattatttttcaaatatttattttccaattttctacttatattattcataaattattttaaattaatatgaaataattcaatatgttttaattattaaatacaatacatccatgcaaaatgaaaatagctttcatatattttaataccaaaaaacaaataaataattaaaaaaaatcttaaacactggttatgaaatcttcaaaacattgtatactataataaatctttttcatttatatttctaaataacactcttagttaagacatatgttttacatatttttttttcattggcatactgataaagcccttaatgtttgctcaattttttcatttggacccttattctttttggggattttggtcttcaacctctaaaatttaatcaaattgcttacttttagatgaaaaaattgatttaacttgttcaaattttaacggcattgataagaccactagcgtgacaatctacg

SEQ ID NO: 14112 - DNA, 548 bp, Gossypium hirsutum
tttctatttgtgattcttactgggttttgcaagggaaactggtataataagcagaaaagtttgctttgtaagtttgaagaaatatgagcaataaataacaatcagtagaaggctgggaactgtgagagtagtatgttttctggcttacgagcagcagcagaaaagtttgcttcgtaagtagtatgcgtggtagttaagattgccactaagcaaatgagatgtgagagtttgatgcatttcacttacactttaaaaaagctcatggaatcaaacatgccttgtcaaatgccctttggtggcaattatttcaatatttttcttcttcctcgtgatgtcttatggtgcctatgcaggccaagctaggatgttttcaggcatggttttgtgtagttacggactggctctttttacctgtctcatctagtgaattgtgcaatgtgcgattgaaaacatttattggttgtttggttgctgagtatcatctcttgggttttcttctgttttttttgctcattcttaattttatggtccaagtgatgggtgtgttt

SEQ ID NO: 14113 - DNA, 679 bp, Gossypium hirsutum
  misc_feature (484)..(488): n is a, c, g, or t
  misc_feature (490)..(492): n is a, c, g, or t
  misc_feature (592)..(593): n is a, c, g, or t
  misc_feature (622)..(623): n is a, c, g, or t
aaaagcatcagtactatggttaacaataggagtagaactggtattcttgagaaatagcactatttagaaagttaacaataagagcagaacaggtttacatgagaaaaacactacttagaagagttaataatctgtagctcaatgattaacatcaaatcatcatgtaacatagtttgttggatctatcaactcattagctaccactctccaagaccttggtaagtagatttttcagcagtggaataatattggtcccttataagactttgataactcgaaaggaagcatagtatattgacaactccgatatgaacttccagcatgagacatgaagcgatttatataatgcttaagaaatgaaggaacgacagccttggtattcatattacaaagtaaatgtaaaagcttataagtgagcatcaaagctgagaagttaggaatctaacatacaatattttgtaaagaatgatggctacatgagccnnnnntnnntctttacaaaattattgtatgttagattcctaacttctcagctttgatgctcacttataagcttttacatttactttgtaatatgaataccaggctgtcnntcttcatttcttaagcattatataaaatnncttcatgtctcatgctgggaagttcatatcggagttgtcatatactatgcttcttt

SEQ ID NO: 14114 - DNA, 552 bp, Gossypium hirsutum
  misc_feature (289)..(290): n is a, c, g, or t
  misc_feature (477)..(477): n is a, c, g, or t
  misc_feature (533)..(535): n is a, c, g, or t
  misc_feature (539)..(547): n is a, c, g, or t
ctacaagaaaagtaagaaggaatcagtttacattgaaccgcaaacatatttataaccctttaaacacataatcagttatcaaatgagtaaaataacaatagataagaaaacaaccatggagcaaataccttagcatattgaccaaaaaaggcttctacatcttccatcttgacattaaactcaaatggtgatgcagcaattgttctactgtctaattgctctaacaattctttaggctttaatagtgcggtgcttctaccaactttcttccctgaaagatcgaaacccnnatttaaaattatgtggaaaaaaaatctttgtttggcttagcttatgggaaaaagtgaagaaattctccttttttatcttcattttcgattttgataaaacttaccatcttcagaaaccctgagggaagaggaagttctgagagtttcagcaacggcatccaaagcagcctctggcacttcttccacncttcacatcccttaaattcaaatggcttctcatcttggaaacgaacaaatcaatcnnnaaannnnnnnnnttttt

SEQ ID NO: 14115 - DNA, 699 bp, Gossypium hirsutum
tcggtaaatttgaatgagcgtaacatttaatttattttttgacttatgttataatatttaatatcactgtaattattatttttacattaactgcaagtaaacgtatcaattatctaaatctacctttagtataatatctcttgaaggtttgatatttattttgttatcgctcgactaataatttagttggctaatttccttttatgagttaaataaaatgtttattttagaaaaaaattattacaagatttggaacataaattacataataataactgtagtattcttacacgatttaataattcttagtaatgaatttttattatttgcaagtgttttaagacttgcatattatattttaactaacaatattttagacatttttttgttcctctaaattctaatctcataaatttgttgaacaacgcaacaataaaattacttaattcaatttaaaaaaaaaatattttaacattttatttattttttcgtctcttttagtttttgaacatatatattttttgttaaatcattcaaactggatgaaaaagttaacgataactttgctaacataacatgtcaacatttaattaaaatttttaaaatatttttatactttttttaataatttaatgatttttttatttttctgcatttttaaaatttaattaaatgcttatgtgtcatccacgtttatgc

SEQ ID NO: 14116 - DNA, 691 bp, Gossypium hirsutum
tcataacctgccaatgggactaagccagtttgctcccatttccacaacgtcaaccagaaggctctccttggatgctaagattgttaaaatggaaaagaatccaaaaagtgtggctggtaaattaaaatactatctcttgagattagcttcatcaaattagaagtgttcttgctcatgtattctatttagttcactctcgatttgttttaatggttaggtagaggcaccactgtattaaagactcgtggtttgggcggttcaagacatattgtgcctcagtctaccctatctaccaaatcttcttcctgcttcccagcctctagcaaagcagagctgataaactattgtaccttgcttgaaagtagtgccagtgtttaatctgagggaatggaaaagtcttccttgaatttgactaaacaaaaaaacgactccagaaaagttatccgttcttcctctggttatactatcagtaacccatccaaaattgtagcaaaaggtaaaaatcaagcaggaaattcgaagctttccacttttttgaagtcttcaaccaagctctcttccagtatatctcctgctagctctatcagtgtacagtcctcagagtcactatcatcaacctctgctgctaatcaaaggcctaacattgtaagagataggcttggtattggctacacaagggactcactacaaa

SEQ ID NO: 14117 - DNA, 280 bp, Gossypium hirsutum
  misc_feature (65)..(71): n is a, c, g, or t
tcaaatcactaggtgagaccataaacacctaaaaacaagtgaaacaataaaaagcaaaccaagcnnnnnnnttaagaacatgccgaacacttataacaatacaaaattaaaatagaaaaagaaaatatataaagataagtcctattggaaacaatctaagagttagcttaatcaaagaaaaaaccaaagatttccttcaaaagaatcaccaaataataaaagatatgatgggtgttatgtgcgcgagagatgaaatatatcaagagtatgtttttttttt

SEQ ID NO: 14118 - DNA, 517 bp, Gossypium hirsutum
ctggaatttcatatgttgcaaggcaactcttttttccttaccattccaagatggtttttgaatttcaaatgaatatgtaacatttccaaatctgataataacgtttatgttgggtttagggtgttacagtaaatgctctcagatatattgtttaacttaagaatgaagtacaaggatgattacaaatgaggggaggcctttatttataattaagcttctataaatctaacagtacaggttgaattacattaattactgagattagtgtctatctataagatgatagtcttaagagatttaaactctatacatttatatattttagaatttacaatattcaccatgataattctagtctaactggagtgtttcactggatcactaagactttaagtagatcagtttctctatgtgttcaacaaagtggaacagtttaagtcattcaaatgaaccttatttaattaattaatctccacaattctccatttaccgacaattaaccgataggcataaaggg

SEQ ID NO: 14119 - DNA, 496 bp, Gossypium hirsutum
tccgataggttgttcctctgcacatctgaaaggtgcgttatgcttacagtcattgatgcaaagtataatttgtacactcttatggggaaagcaacaataattgtacagtaatgtattgatttgtatagttgatttgtgaattagcatacattgaccatgtatcttctgtaattattcttccttaaagtggaatactacattgttttttaagcttttgctcaaattgcctttgcattagccatcttgtctccgatgtacttaagtggttgagtatggttcaggcttatgagaatttttgtccacgagacttttgggttggtgaatatacttaatagctctctctagtatagggacctaattaaattaggctctctactattaaatggattaatttaatctttatattattaaaagaattaaataaaatcaaattgaaatatagttaacatttactatttaaaaaatatcaattactggttaatagaacgcccaattg

SEQ ID NO: 14120 - DNA, 584 bp, Gossypium hirsutum
cttatcccgttatctgtgatgcagaatttattgataagtcatgtgtaaattgctagcatgtcattttattatgttaaaaaataaataactttaacttattttcatttagattaaaaaataaacacacttgggaaaatgatttcttgtttctcccgtgaattttctttttaatctagatgaaaataatttaaatttgtttgtttgtttttaacaaaataaaatccatgttagcagtttacacatgaattaaccaaaaattgtgtcacataaataataagattaataaaatgtgaaaattgaatcaaaattaaaatttactatatataaatacaccaaattaaaattaatatataatattataaattgtatcaaaactcgtttataattttaatatttatctcttacataaatcaaatggtatattagagattaactgtacacaacaaagagaaagagaaaggaaaaaaaaagaaaagaaaagaaagatagggatgattttgaaaatgactgatgggagggttgaagcaaaagccttctttagtgcatatataaatatgtgacacactaaacccaagatggcatag

SEQ ID NO: 14121 - DNA, 463 bp, Gossypium hirsutum
agcgctggactagaagtgccaaatcttgggttggattggataagcaacatgctgatcctcaaggtattgagacactaaccacacgcttcaataacctgtgtcaggaagctttaaaattggcagaagaaggagcaatggctccagagacatataatgcagcaatcaatgctcttaaggaggctgggaaaaagattgcctctgtaaagaagaatgtagctaaagtcagaccacctagctctcataatagtggggataatcatgaagatggttgcaagaaaaccacttctcctgtctccaaaatgatcccatctttgtggccatggcaagatgcagtaccacctcattttaatcttaatgatgttggggccccacttactgacttgaatcaacctagcatggtgcctgtatctcttcatcgtgatactggtcaccctgatagcacggtatgtgttgaaagaaatct

SEQ ID NO: 14122 - DNA, 660 bp, Gossypium hirsutum
gaagaagacaaaggtgggattgattttaatataaattataataattaaaagccaacaggaggggtaggtaaggggttcacttgtttcccaaattctctgtttttaatgacgtcatacaaatatatatatatataaagaaaacgttgcatatagaaaaaaaaggtcataatttaattattttcttagtctcaaactcaatgtaaaatgtttaactttgtggctttcctagtcatactgtatacataattataaagacagcatatatgctaatggagatgtaaaagcattaaagttgacaccattccctggcctctcatactctccttccacacaaatgtagggtagggaatcttaaacagaacaaatcatcactttgttagttaattaatatatgtctcaaaattttgcacaaccaaaaaagaagctctttctattagaaaacaaatccctgaaaaggggaattgtgtagtggaatacctcattctgttttgaaataattgatggacggttcacaatcagtggcaagtctaagtaaagggagcacgagttctgaaactgactgccataaattatacatgaatggtgcataaatgcaagcgatccaacaacagtagagaaaacaatattccatgaaaaaagggggaaagggggagaagatgg

SEQ ID NO: 14123 - DNA, 592 bp, Gossypium hirsutum
tttcattacttgtttatttgcttatgcatgcctctaattcataagttcttggctttcaaatgggttatttaatcttaatcttaatattatgttctgaaaaatgattaggtgggattatgcaaccaatgatattaacattcagtcccctcaccctctataacaatggttgaagccaggactatttattttgagaatctggtaactatttgggtgcgggctatgttattcttaatgaactcttgggggtttaataatcttcaagttggcaagtccataacacacacttaaaattagttgtctgaggtatgagataccttggtggtgatgcacttggtaaatataggacttgcctcgatagtttttgtcttactgttagctatagcatttcatgatactaggacatctacaaccaatgcactattttttgattaattgaatgagtcacgctttattggccaaattattaaataaatctggttgcgtctgtataggggtagcaattaggtgtattgggtcagattatgaatttcatttcagtttagagtcacttcaggtattgagtcattttaggttctagtttcttcaagtataa

SEQ ID NO: 14124 - DNA, 645 bp, Gossypium hirsutum
gttggtctggcgtctttgttggaatcaatgaccttttctcctgaaggatcatttggggccacatcaattcaggttattttccatagtggggagggacttgtatcaaatatagtatatgctttacttggtgtctcagcaatgtcacgggtaaattcagtattcttgaatctttaatagattattgactgcatttcatttgaaaattcattccttattttggtataaattcttgatgtcatatgatgtatttgttattacatttgaaatttaattacagggcattaactgatatttcattgtgaacttggaaattttaaatgtttaggacttgcttaacatctgttgaagtattgagatgataatgagagaatatttggtgcagaattgaagtttaaatcttgcatttctttacaaatacaataattgttgaggttgcgttcaagaatatatcaacttggtaggtgatgatttgacaataagttttacttactgacagaagttatggactaaggtgtgataaaggaacatgaggagtttatagagggcctcaagaaagcgggctacaatttccatgtcactctgattatgtaataaaatttctactctaggtgatcatgtagtgaagtagctgcataaattggagca

SEQ ID NO: 14125 - DNA, 648 bp, Gossypium hirsutum
catgacgcaatatcttgtaatcgaaccgttcctgatgcccttcatgcccttcatcaccacgaagccggaatagcttggatgcctgtttcaaccacatggagaaatcttaggaaaatctgcaacttgcacattttcgctagtcagaaacttgacgctaaccaacacttgcggcgtaacaaaatagaacaactccttgctgatgttggtgatagttcccgcatcggagaatcgatagagatatccactgttgctttcaaaactacgcttaatcttatatccaatactattttctccgtcgattatgccgactcttcttctaatactgccctggaattcagagaaattttacaggttatcaaggaagagttgggaaaagccaattttggtgatctttttcctactctagctaaacttgacttgcaaggcataaggcgtcgcatggcaattcattctaagaagatgatgaatatttttgataaagagattgataagcggttggagttgagaaagatgaatgattatataccagctcaagattttttggatactcttctccaaatcagtgaagatgataacgaagagcttgacagaaatctgataaaacatttgttttttgtactttttctctcttcagcctctcaattgttt

SEQ ID NO: 14126 - DNA, 603 bp, Gossypium hirsutum
ttctttgcaacgtatactggaccttattatttgctcttccaagataaaaacgaacgtttagatgacaaaagaactaacctcccacatatatacacataggatatctaatattatggagatttatcccgcatcaccatgcatatatatatgtatgtatgtatgtatgtagccgttctgtaaaggttcgtatatcaggatctagcaaagcttgttcatatatgatgaaaacttaaaaggcaaaaagaaatatatagatacatacaaaacaaccaaccaacctctttgcaaatgttatttagacaagacgtataatctgtaaaaataatggttttggagaagagagtagaaatggagacaagaaactgaagaaaagcctaggaggagaactggttgaaggcaatgagaattgcaaagatgggttaattacggtatccttatatatagaagatggcagcatttaatggatggttgaaatttcatgggagtgaacaacaggatggtccatgtacaagttgtgaaggtggaaattagaacatgaaaaagaatgcaaaaagaagaagaagaagaagctttgggaagcaaagggcaatagggtttgagata

SEQ ID NO: 14127 - DNA, 601 bp, Gossypium hirsutum
cccttcataagtaaggcaagaccagaatttgcatgttcattttatgaggaattagaactgttaaaagtgattatacaattacatataagtttttatgtgatgttgtaggtggagcttgcaaaacgtcttgtgagtaattccttcgctgatagagtatttttcaccaactctggaacggaagcaaatgaagctgctattaagttttccaggaagttccaaagatttatacatcctgataataagcagcctgcaacagaatttatcacctttacgaatagcttccatggtaggacgatgggagcccttgctttgacgagtaaagagcactaccgttcaccatttgagcctgttatgcccggagttactttcttggagtatggcaacatacatgctgcaatagatcttattaggaatgggatgattgctgctgtatttgtagaaccagttcagggtgaaggtggaatatacagtgcaacaaaagagtttttgcaagctctgcgttcggcttgcgatgatgctggatccctcttagtctttgatgaggtacacagcttcatatgtgctatataggtgattggttgtagtagttagttgaaatggg

SEQ ID NO: 14128 - DNA, 667 bp, Gossypium hirsutum
ccgaaattggctggaaattgcccggaaaacctgtttttatagactgagaaccctataagatgctgcatatctccaaatcctgcagggatctctccataaaagctgttattgtaacattgaaaaaccgtcaagttcatctttccaatctcttttggcaatgtcccattcagccggttcgaggagatatcgaattctttcaagagaggaagatcagctatccctggtggtaacttccctgtcaaattgttgaaaaacagctcaatctggttaaggtttttcagttttgaaattgagttcgggatattcccagaaatattgttccaggacaaatccaatatctgtaaggccttcagctcaaaaacggactctggaatgtgcccaaccagattggagttgcgaagatacaggatattcaagttcttcaagttcccaatactctccggaatttcactctcatcaaaatcatttccacctaaagcaagaaaaaccagcccggttaagtttccgatccagctcggaaacctgccggaaaacgagttaaatgccaatccaagaatctccaagctcttaagtccagaaagatcgggtataattccaaccattttattccaggatatgttcaaaactctgaggtttgaacaatggtttatttggtcaggaagttcca

SEQ ID NO: 14129 - DNA, 568 bp, Gossypium hirsutum
tgttgttgtaaagaatgacagtatttgcttaaatatcctcaagtagcccttggtcttgattaatagagtccccgtttttgtagattgcttacaaaagtcaggtcaaaaacatgtccctggcaacttcctgttcatctttccctccatttgggaaaataaaaagaattgttatcaattccaccaactcttaggaagaaaatataaaagcgactgatattgcgatttaaacatactgtgtatagcttttgcttgcatatgtaagcacctcccgttacgaaggtcttgaagttgatagagagatggctatgaaggatgcaaaggccctctataaagcaggggagaagagattgggaactgatgagaaaacctttatccgcatatttagtgaaagaagtagggcacagctagcagctattagcgctgcttatcatgacatatatggaggttccttgaaaaaggttaattttccttgtcttcttatctcttttatttaaattcttgttgtgatgatttacaaaattgaaacttttgcaggcagtgaagagcgaaacatctgggaaagtttgag

SEQ ID NO: 14130 - DNA, 617 bp, Gossypium hirsutum
  misc_feature (359)..(359): n is a, c, g, or t
gaatgtctcatgtttatctctaaatagtaacaactgcataaataaaagatagagtaaaactataaataaaaattctatttcaaattatttaactaagttacaaataatagtacttgaatctaacctgattaaccattctgacttgagtatccatagaaggttctaatctttcaattactgatcgtgtaccttctaatgtttctattaatacattctcacaatgctccaccccaaattgaaattgagggttgagaaaataacctaagtataatttataagaatatcatcaaataataataatctaaagcttaaaataataaaatataaaaataattcttaattatatgaaatattttttnttaccagctgaatgcacgtaggaatgcataaaattccatctattgtcaataatcttttcatactctgtgaaatatcaacaattttgttgaattgctcgtttacccctatcaacagcctcataaaaaaacaccatcgttggtttttcatcattctccacaagtctcaatactcttactaagggctcataaacttttatgaggtcgttgttttttttccaaaaatcttttcccacaacaatttttttttttttataaaca

SEQ ID NO: 14131 - DNA, 656 bp, Gossypium hirsutum
aggtgagttgttaggtaagagtttagaaggggttaataaataagacaaggaagtgaagttggttgtttcatgttaattgtcaagacgggtttaagagggttcagtgcataggatagggaagagagattggtagagactgccatggtttgcttttgtttgctttgagggtctactttcgtatctaccagagttactgacctgtctaccagcaatcattttatccattccttcatgcatttgatcgaacacttcggttttggtttcagcgataatttcataaaatgctgcaatttatgagcaagcatttgttttatctttgtttgcatatgcttgagttcctttagtgtttctactcaccactctgccaaccattgctgaggattgttggctctgattccaaattgttatgaccttgagtttgggatcaagccatgggcaacgggaaaatcactcaagctcatcaaagggagcctgcaaccttaggactcatcagagagagaccgaatctccttttagggttttgataaaaatttggcttgcctttattttattaagtatataagcatttgctagagaatttgtatttggcctaaaaagaacccagagaatttgtaagcaaacgctcttttgcagctttctgcccttcaactttatat

SEQ ID NO: 14132 - DNA, 696 bp, Gossypium hirsutum
gaattaagtccgttaacacctcgtgttcgactccggcaacggtctcgggtatggggcgctacaataatacttataatgcaggtcggaggaaccatccaaatttctcctggggtggtcaaggggatcaaaagccacaaaatcctcagggttttcaacagccaccttatcaacaagagaataaaccgaaccttgagaagatgctctctaaatttatcttggtgtcagaaacctgtttccaaaataccaagacagcacttaaaaatcaacaagcatcgatccaaggactcgaaactcagatgggccagctatccagactaatctctgaacgaccacaaggtatcttaccaagtaatactgaacctaacccaagggaacacctcaacgcaattagtacacaagataaggaaggattcattgcgcctgagccagaattgatgcaagaaactgtggtgagcaaaggtaaaagtgaggtaagtcataacaaaacattgaatgaagaatataaacctcgtgtcccataccctaacgcgacaaggaaagaccgcttagactaacaattcggtaaattcattaaacttttgaaaaaattacatattaacttaccgtttattgaagcactgtcgcagatgctgaaagcaatgaaatttttaaaagagcttttagtaaataagcagaagttggacgaaacgtcacata

SEQ ID NO: 14133 - DNA, 620 bp, Gossypium hirsutum
cttgatcagcattttctgcatttttagttcaacttccgtgcaaacttcaaaactgccttaaggttagtcatatcttttatttaacggatgccatactgatagatcagtttttctttattagactttgattgaaaaattcctttttttttatttcttacagttacagctcaagagattagccaaagatggtgacagaataaaaccgttgaactcttttcttgagaagaagaacggttcatcttccggattgcggatcaatctagataaacaattgcaagcttggagagaaaatccttcatgggttaatccacctccagaaatagaggtaaggagttattgggaaattttatggtttcattaggaagaatgctgctagtctcatcctctgtccataacatggtgtctggacataggtattgggatatgatcctccaaagattctccaaatacacaaacctgctcacatctgagtttgagtaacaaagcatgatacttttgtagtactatttcattcgtaaaagcgacattgaagtaaaacctttgtttctaatcataaaagataaattatatatccaatgtttacaccacattgctgttacttactttcttgggcttcattg

SEQ ID NO: 14134 - DNA, 680 bp, Gossypium hirsutum
agttccatcctcctgacctttacaaatctcttccttttttaccttcattcctccttctattggaactccaatagaaagtcattacaaatcttagtcccatctcctttttctattggagctccactagaaggtcatatcccttcgtatcctcctttctctaacatctattacaaaaattaaattatgtaatttgattcaataaatttttttatcgatttgaaagtcgaggttaagtttaatgtaagttacttaatatacacaatgcttattatcactaaatagaattacaagataaaatttttagtagtaatgattaatagtaagttttgtttttcttttcgtatctttatttgttcgcacaaattaaatttgttttaaacttttttaataattcaaacaaaattaacttttttggtatctttattttgtattttttatttttattatgtacacattattacttccaatagaaaatcattacaaatctcagcccttcatttcctccattggagctccaatagaagttcattacaaatcttaacctttcatatcctcctcctattggagcagtcattacaaatctcaaccctttatctcctctttcaattggagatctcaacccttcatctccttattttattggagctccaatagaaggtcattacaaatcttagcccttc

SEQ ID NO: 14135 - DNA, 384 bp, Gossypium hirsutum
gccttatgccgcgaaccgatgcagacaaagctaaaagtgtcattccctgtgcaaaaagtaaaacttttcttgtctcaaataccaagatatagataaattttttgaagaacttggtaatactggactaaataacaagcaccaggtaagttaaacttacaatgatatagacgattgaaaaacaggcaattgtccaatatcttcctagataagaatcagccagaaatgctccaattattggtgtaatgtagcatgttccaccccagttctggttattagtagcagccactgaggtatgttgatttagctggtgcttgaagtaaagcacctagattggtgctcatcccataatatgccaatctttcacagccttcatttccagttaaa

SEQ ID NO: 14136 - DNA, 300 bp, Gossypium hirsutum
tttttagattagttaataacattatttgtactggacatatatattattatgattacttaaagaatattgtttctaagataatcataaattaaaaattattaataatatataagaattaagtactaagataatgtgcaattatgaagatatagtgtgattagaatttagcaagtgatgggtggttgagaaggctttgctttataatcaatcatgcatccagattctactaacaaacaccccccctaatcaccatactttatccctttaatgtccacattattctcaactactatttttttt

SEQ ID NO: 14137 - DNA, 468 bp, Gossypium hirsutum
gtcgacttagctatagagatgagcaagcacacacatttacagcttctacataattgcattatcattactttgctaatctcaagtctcatttcctaagagtaaagaggacaatgatgaattaacacagaagttgaacccaaaaagctgccttgggtgcatttgggagtttgatgaagatttaataaaggttaaattctgctattagtcactgtactttgtgaaagttatggatttaatctatgtattttaatttgatcatttttagtccatgtccttttcaaattttaaaattccagtcatcaccaaacaataactattaaattcattcagttaagttatgctatttcccaaatatcatgtgagaaacgtattatcatatgtgtaatatcatgtgagcttgtaatatttacatattactcattaaaaattcagttaatggattaatggcagtctttcatgtcaagattg

SEQ ID NO: 14138 - DNA, 670 bp, Gossypium hirsutum
cgacctaattatcatgcccaactaaactcaaaataactacaaagacaatttggaaattttaaaaaacttacctctaaatcacgattatccttctcaaaaatttcaaatccaaacaattcaatatttagagttaaaataacctccttttaaaaaatttcacaccttgatgattcgttgtctgagaataaaaacataatcagctttatacatctgcacctctcctcaagacgtggtgaaacgcatgacaatttaaaaggaaaagcgtatgcgataagtttcattctcagatattccccatttcgcaaagtcaagttttcaaaaaagtcagtttataactattctttgaattagatgggggacaaattgttatcgtgttcgctattatcgacccgttatccgacttagactgacccatagcttacatagtttgcatcttgggttcgcatgtgatgagttcatatcctttcatgaatttgtataggataagttcgcaccgccatgcagacaaactctacgtagagaaaacatattaatcctaaaataagttaagtgttgagatatatggtaacctatctacgacgtcccatctcataaccttacacatcaaaacactcaacaacctaattgttagaaatgccgaacatataccgttctcgtaacaaagagaaca

SEQ ID NO: 14139 - DNA, 641 bp, Gossypium hirsutum
tttctctaggcattttcgttgtttttgccttggaaatgatgtgtcacatgaatgattgtgacatgtgataggaaccatagcgtgattgagatgtctaatctaatctgtatttgactatacatattaagccttaaattaaataatattcagttagaagaatataatatctttgccagaatagaacaaaataaattacttgtggtgataaatccaatgagttatcaatagtgatcattttgtacccaatttgtttgcatgaaggctgttgaagaatggccagcaaattggaagtctttatgacttttagactttcttttcggtggtttggggggtctggggagatacttcttgatgtaaagataggttaaaatgcttggtttccacttttgttctttccttaaattcacacggatttcattttctattcttactggattccacacaggttcttaagggccatattgctctgggaaatgctcgctttcctaatggaacaaatggtattagaagttttctctatttgtttgcttaattattcctcatttatttgagaatttttgcttgaagtcatctggaattagtctaaactccaatatctaatttatatagagagagactattttgattgattggcttctata

SEQ ID NO: 14140 - DNA, 697 bp, Gossypium hirsutum
  misc_feature (681)..(681): n is a, c, g, or t
  misc_feature (683)..(690): n is a, c, g, or t
catttcccaaagaaagttcagagctttttccatccttatctaaccattatcctacaacaatgctgatttccgaagaaggaaagggcatttagaaagtatagcacattgcaaaacaatgtgacctttatcaaccaagtgcagaaagttccttcaaccacttggcagcaatgtagaatgcattgtgtttgtaatctaagtttcttcattcacatccttcatttctaaaactttgcattgtgatctcacagaaattaacaacaataacgagcaaacacaggtatgtaattgtcatcactatgtcgaattaaattttaagggattagccatgttttattttactgcaaagctaattaactctatgcagaaattggcaaaaattaagataataaagctatgtactgatattttctaaggcctaatatgaccactcaacagttctacacaaatactacagtagaaaaaagaaaattgttctgacatatgtggatacaaggaaaatgagttaaaattatgaccggtttagtgcgtgatctaggaaagttagtcatagaaatctaccagagtctagattttagtcatagaaatctaccagagtctcgattttgtaaagaatggttacatgatatgagggtgtatttagttcagaaaatgtcataaaggtcggtgttatcacaggactcncnnnnnnnnttttttt

SEQ ID NO: 14141 - DNA, 655 bp, Gossypium hirsutum
ggccatgcacattacaaatgcctttgagtcttgtgaaacatttgaggtccaactcgatcttcttcctagactgatggtttttcttcattttgcttaagcaggtattggaacttttaggggtagtcttactggaataagccttggaacagttactccagctcaaaagatatggaggagcttccgagctcttggtgacattgcttttgcatactcgttttcaatgattctcattgaaattcaggtatatttcttggttctctttcaaatgtcgtagtttgaattaatgatttaaatttacaaagatagatacgattccaactctcatggttgcatgcataataaatagattataatatattaaaaaagcccttaaactactgcactttgtccttgattttaatattaaagtagaattattttaaatttcatactcttaccttaatttcttattgatgcaataaaaattctatagacttttcagataaaaaatctaaacttaaaagactatcaaaattttcaaaagaatgatttagtgagctatgtatataagcactttcaaaaggttttaaaatattattttgttttacttttaaaaatattattttatttttatttaataaattattttcatcaaattcacctcagcataaatgca

SEQ ID NO: 14142 - DNA, 620 bp, Gossypium hirsutum
  misc_feature (60)..(66): n is a, c, g, or t
  misc_feature (547)..(547): n is a, c, g, or t
  misc_feature (585)..(585): n is a, c, g, or t
  misc_feature (587)..(587): n is a, c, g, or t
  misc_feature (589)..(590): n is a, c, g, or t
  misc_feature (595)..(597): n is a, c, g, or t
  misc_feature (601)..(601): n is a, c, g, or t
  misc_feature (603)..(612): n is a, c, g, or t
ctttctcaagcaaacttcttctaatggctgccatttccgaggaaaaaaatatatgaaaannnnnnnggggatgcaatttcatgaataattttaccatcattataaacaacattccgtatttaaacattttcaaataatatcaatcttattaatgcaactttgtttaggatggacagtatgttttattttctctactttgttttcatatccacatgaacctaacatactttgtgatttggttgaattcaattattattagcagtttccataaaaaagaggattatttgcaaataagtgagaagagcataagacgacgaggcaaacaatgagatagaagtggttttagtttcaaagatgtttttttttttacatgtttgattcttcaatattatgttgttgaaaataaagaaaaacagactgttgagtcaacattccgttagtagtaaacagaatttttaacggaagcggttattttaaataattattttatttaaagatttttttaaataattaatattttaaatttgtataattaattataaaagcncaaaaattttttggtatgatacaaatcataggcatcanancnnaagtnnnacanannnnnnnnnnaaaaaaaa

SEQ ID NO: 14143 - DNA, 544 bp, Gossypium hirsutum
tttaatcagacgcggattaccagataatataatgatgggtgtcatttttcaacctgcttcagtttcacttttgcaggtttattttattcctagaaaagataaataaaatattatattatggcctagggggttgaaaatgtcaaaacagtcgcatatttttctcataaaccagacaaaaccccatgtgcattgatttcttaagcctatgttttctctttctggttgaaagaatcttaccttgtttattgcattatccaatagtgcttttatttttttattctacgataaaatgacaaaaccctttagttttattaggtggattgagttagacttgcgataataaaaggttgaaattcttgttttcatttttcaattttcatcctttgttttaaaaatgcctaaagaaaacatattagtactgaattgtttttctttacaccaccaaaatcaagattgatataaaattgtacacaaccactactcattttacaaatgctgaaaaccattaaaaaattgagacaacatgatttttttatttttaatc

SEQ ID NO: 14144 - DNA, 650 bp, Gossypium hirsutum
caaagcataaatgtcgaatcctccaaaaagacctttttacgtttggaatcactttctgactctccttttactatatatttgtatatatgtatatatgtatatatagcaaaccatgtttgagccaattagacggtgtctaacaatcctttcttgtacaaaatctgtccccatggccactctcgtatccgataaccttgatggtatctatcattaaacatctctttatatgattgttcttcattcaaacacaatgtctggttcattgtttttttaatttcagctcatattttgtgtatgcttgttaaatttgcagaagttgaaagatctatatcagatacagcaccctgtcattacatactaaagatacagtcattttcattactttcaaagaatggcattgaaaaatatgaatctggagagttccaagctggtggatacaaatggtacttttgacttattaatggctgaattataggactgtatgttttgtaagttaatgttggctttctatcacttgcttagcctatcgtttttgtgcgcacttgcaggaaactcgtactgtatccgaatgggaacagaagcagaaatgtgaaagaacacctttctctatacttggtttttgttgatgttagttctctctttcgtcacgg

SEQ ID NO: 14145 - DNA, 561 bp, Gossypium hirsutum
  misc_feature (544)..(544): n is a, c, g, or t
cgccacgacgtcgttgaacctttactcttggaagttgaccagatctaccatctcgcttgtcctgcttctccagtccattacaaatttaaccccgtcaaaactatcatatcctttttatcatttaattttaatcaataatttattactttacaaaatcctttatgtttttgcattatttgtttatggtttatacttgggtttttttccccttaattcgaatgtgatttttacaagacaaatgtggtgggaacactaaacatgttagggctggcaaaaagagttggtgccaggttcttattaaccagtaccagtgaagtatatggagatcctctacaacatcctcagaaagaaacttattggggcaacgttaatcccatcggttagttttttttatccctttttgaatggaataacattaaatccgccggccggttggaaatgaaaagccgggttaataaacacatttggtggcctaaatttttgggcacattttttattttttttttaaaacttttcaaacaaaacccgcgaaaaccgggattanggccaaaatgcccaaaa

SEQ ID NO: 14146 - DNA, 655 bp, Gossypium hirsutum
gggttgtttagcaattatggaggaggatgggaacaatatgggaacctcaataatttgaaaaaaaatttgtgggcgctttcatgaatcttctggaggagtggaccgtttgttttgggtccctttctttgctttacgtccaacaagggggataagtaatgagtaataagttattagggtaaactaactaattggtcatctaatttttagggtcttttcattttggtcatttaaaatgaaattcttgtaatttgatcatccaactttcaatatgttttcatttttgttaactgtacactccacatttggtcacccaaaaaatatattttttaagtaattggggttaagaaaaatcaaagattaaagtgaaaagtggtagaaattaaaataatacataaaaattgttaaattgtacttgtttatcttattgctgaaaattctaaatttgagttttgaaatataaatttttaaatattaatattcaaaattatagtagcaaattggttggcattatcaatagataaaaaatttcaacaatttattttgatggttttgaattattttaaaatattattaatggaaatgactgtctttaatagttgtttacgaaacccaaatttcttttgattacatgatattgaatcttccatgctaagct

SEQ ID NO: 14147 - DNA, 605 bp, Gossypium hirsutum
  misc_feature (27)..(27): n is a, c, g, or t
tttcgagattcaatcaacttcatccanggttgaagtcatcgtagagatcatcctcagaaagcccttgatactttgtttgagggcaacataactgcacattaataaagtaaaaattagcgaaggtttgcaaaaaaggaacatattacctccgctaataatttaaggaaacatgaagaaatttcaataagtgaacttagttaaaaccacccaaagctaaagctattgataacagaaggttattttaatcattattcttataattaaagtcaaatatcactatctttcatcaataatctcaaccaacttctacttttatgcaaaaaccaaatcaagttcaagtaaaaagatgtttcagaacagaaaactatcgtaaaatgtaataaagaaaaataaggggcataaattggtatatagttgttcttctgcataaggaactaaaccaaaaagaatgttgttactttaactataagttggttttccagccagaaagagcagtatcactgaacacttgacggtgatatggtttgaaacatccagcattaagggaatattggaaaatatatttggcaatacctattccctggctccgggtaacaccgggctga

SEQ ID NO: 14148 - DNA, 388 bp, Gossypium hirsutum
aaatttaatccttaaatttggcaacttttctcaacatagtcattaaactttttttatctacattagtcttctaacttgacaacttttctaaatttttcatgcatgtgatgacatcgcattctgatataaattatgtttaacaggttatgtatttatataaattatgataatatgtgtatcaatattattttcacaggtaaaagtattataaaagtctgtattgctaaatgttagattgtattttatcttatttactcaaaaaataagtaagttagtttctcttcattagatcaaacagcaaattgatcattttattaaaaacttaattcttttcttattgttaaatattggttcatgtacatcaatttgaggtacggtgacacgtcac

SEQ ID NO: 14149 - DNA, 381 bp, Gossypium hirsutum
tttgtcccattagtcattgtaatgttgcttataacatcatttccagcaaaaattggtcaatagactcaaggaagtcctaaatgatatttttctccatttcaaaatgcttttgttcaaggcaggctgataacgaacaacatcctgttggcggggaaactactaaaacccattaaaggtaagaaaagagggtagggctctttggcagcactgaatattgacctcccttatcatgcaatgcatttcgatggtcttttatcatgttttgattaatggtaacctaataaagcatttaaaaccatgtcgtggattaagactaagagatcgaatttctctttatttgtttgttttctgccagaatgtcttctctgcaatgctttcaaa

SEQ ID NO: 14150 - DNA, 361 bp, Gossypium hirsutum
  misc_feature (321)..(321): n is a, c, g, or t
  misc_feature (358)..(358): n is a, c, g, or t
tatactgcatatacaaaccattatattaattcaatatgaaaataaatgtatttttttatttctttaaatatatacaattgaattaaaattaagtttcatgtgtgtgtatatatatatgaactgtaattcaaatttcaagtgcaaaattacaccaaatcaaaatttatgtatcaaaatatacattggaataaaatttatgtataaattaaatatttatatctttatagataaaatttgtggattagtaataaagctttatatttattttaagggttataatttaaattttacattaccccctaaaatttaaaatgttttatntaactcctccatatattaatatataatatcatataanaga

SEQ ID NO: 14151 - DNA, 485 bp, Gossypium hirsutum
tcttataaatagcagatttaatatttatttacagacaataattaaacatccaatttttgaacaacattttaatacatttattcagaccaccccattttgtacaaaatggactgccctgtttatacaacattattatgtataacatcaaattggacaggttattacatcaagtatgcaagcacttaaccggcaagaaatcataattaatatgtctgtctttgaacaacttaaatgcattgataatgcaagagattaaggcacattaacagcctaaatgttaaacattaatcccgaggatgaaatgttgaaaatctagcattcgaacaaattgaaatccagcattcaacagcagcaacttatagcatttaaatcataaatttccctttaatttagacagcaacaaagagtaacaatacatagtattaaaatcaataaacaacagctcatttaacccttacaatgagtagccaaattaaaaaaaaaaa

SEQ ID NO: 14152 - DNA, 534 bp, Gossypium hirsutum
  misc_feature (513)..(524): n is a, c, g, or t
taaatgtgctgtctaaattcgggtgattggatcttcaatggacagcttcttgatgaaggaaaaatgaacttggatacaagaagcttaatagcgttgtctagtggctatggcttgaatgaatcttctaacaagtgtttcttggccgaatagtcacttagggaagccaaagaatcaacacaattcatgtaactagacatacatgcattctcccgttcgttgtaactagttgttcatgcatcgtccattagccttccttcatgtatttgacttggaaattaattcaatagctacctcttggccgaataggtacttggaagaccattgatcagcacaccatgcattttataaagtcatgcatgaatcctcccttgctttgaacctggtcgtgcatgaatctccccattcattgaacaaaaccatgcatgcaccatgcgtccccagctatgcacctacatgaattaaaaatcaattcattaaatcccatgtgaacaccttaaattcggcacaaatgannnnnnnnnnnnaccccttccc

SEQ ID NO: 14153 - DNA, 483 bp, Gossypium hirsutum
attctcctaccattttaggttgtatgatttccaatacaggaatgttttcaattttgacctaactttctttgttacaccaaacccatattctttcaagttccaagttacaagcttcatttttatattcttcaaccttttagggatggaactcgatttgaatccttttcaaatttcagaataattatatattttggttcttgaatttgtcattcggaccttgttgtcccctaaacttgtatttcctcaactaagttcatatctctgcactaacaccgctagtttgtgctgacatggtagacaagtgctcaatacatcatgtgacaaacataaattatatgtatatattaatcaaaaaattataatttttttaaaaaaaattataaaaatgtgaacctggacaaatagttgtcagattggctagtagtgccacgtcaatacaaactaacaatgttagcgcggaggtaccattctggttgactcaaa

SEQ ID NO: 14154 - DNA, 635 bp, Gossypium hirsutum
gttggaatcccattctaaacgtggcttcaaagctattctttctatagcgcttgcttttctcggaaattgagcttagccctttaacccagcgcttatcgagggaattgtttctaagccgacaaaggcactttttcacctacggacaccgctcgctaaccggttactttctgtttacccttcaatcgacgggccttggcttagttttagaggttagttacacatctatctcacttgtaactacctctgactgctttgtcgactctgttgacggagtaccgctcactgcacggctaagggaactctgtcttgtatgctaagagaaagtcttcggtacaactcttcttttctccgttcactcctctcctaacgcgggcaaggtaagtaaatgattgatggccggtggactgctctgctcctgcttgttctctgttttctgcgcggtaggcttgaaccctattgtggttaaagaaaagaggaagtctctgcccatacttttcttttaaactaatagcttaagctctcagactagagctattctcactaaaccgaatctgaaaatcgaagaccgctaacggaactctttattgattgtgtttacagagccttaaaaaattactctttctttcctcttctcg

SEQ ID NO: 14155 - DNA, 582 bp, Gossypium hirsutum
tgatttagaatgttaatttaaatggttaattattaatttggtccttgaaatatagttaaaatatcattttgatttaaaaaaaaattcttaacaataactctaaaaattaaaaataaataaaaattgtcaaaatatattaaaaatattaaaaaatatgttaaaacaaaatcaaacccaaatttattaaagcaaaaacttacattcgaagttcttttttggtgaattatggtgttattattttttatttttttttgaaaaattgaacactattttaatgctagggaaacattttcattttcaataaaattcttgatttgatgagaagtagaactatccaatacaatgaaacactaacactatctgttgaagatgcacttgagtgcaattctaaaaacacctatttcaataaaataataattttattactgttgaaatacaatcaaaccaaagaaataacacatttagaggaaaataaaatctttcaattttgcatatctttttggcgaagaagaatgagacgaaggcaaagaactcctttcactccttctccacactttggagacatgttgatggcaataggat

SEQ ID NO: 14156 - DNA, 660 bp, Gossypium hirsutum
gcccgagttgaaatactgagtctaagaatcggtgtagacggaaccctatatctctttctctgtcttcttattggcgggaaactatgcacgcatcacaacgcgccaaaaccaaaacaacgattttaaaaattttcaaaatatttcttcgatgaaaaaataaattaaatcataataattcaaacgtgaaatacaatagttatcatagttttagattaaatatttctattttcttatttttgtttatctcttttttctaatacttcaaaataaatattataaattaacttccttaaaaaataatcaatttcatcattacatcaacaatcacatttaatataatatcatgatttattcaataaaaattaatgacaatttaatcgccgttctaattttaaataaaaaattatttattaaataatactagaatcttttattattaaattatttttggtttaaattgttaatcgttcataaacataataattgattactaacgcatccaattatatgttaatggcataatcaattaagatgagaacatatagcaatggaaacagaaggaaattcatgactttcagttttacacaacgttgacaacctaagttgaccataaacaagcagccaagaattagagttacttgttcgttcctacactgaaag

SEQ ID NO: 14157 - DNA, 615 bp, Gossypium hirsutum
taaatggcagcttatggctgagcaagctcgccagaaacgtgagggaggaacggatgcggcatctggttcacaagcaagtaaagatgcaaaccgcagacctttatctgcatctgggaaaagtacaaaggacaatcaagaatctgaaaagaggggccctctcaatcctcatggatctggtaagcttggctcttttctagatctattattgttttaatttgatggttttatttaactggttagtattgttgtaaggttcatcatgtgtactgttgcatccgagcaattgagaattggttcctattatgttttttcagtgaaactgtttcttgtattgaaccataaaagcaatgcatggtcataaacctgaacctgatggtactatgcactttcatatactaaaaattaggaaattagactgttgatttgtacaaattattcttgagcatgtgtagagcaattgtactggtatgaaattgctcgaacatctagctatatcaacgttgtgtaaggtattaatgcattgacaaaaccctaaaaattgaatattatgactatcatatatgcttgccttaagagctcagagttggtttcttttccgatcaagtcattcctcca

SEQ ID NO: 14158 - DNA, 372 bp, Gossypium hirsutum
taagccatgaagtgatattggttcaattgtaaaccataaataaattggaatgatttgtatagatggcttaagctaatttagtgcaacaaaacaaataccctcacattgaggtatacggcagtatttgtaatgatgctaataatttgaaggaaagtatttcctaaagataagaccagtaacaacaaaaaggacgttcgaacctcagttattcacttcaattctattgatgtgacgttttcgcttgcgttgcaacagcactacagacagaaaccataatgtctctcactttattttgatgctttggattggtcaatcagatgaccttacaaccattttgttaccatttattgactctcatgaacaatgatctct

SEQ ID NO: 14159 - DNA, 628 bp, Gossypium hirsutum
tcaacatccgccacgtacaccaccatccctatctcagcttctgacgtcctctcccgctcccttcacaatctttccgtcaccctctcccggcacctccgcccctggcctcagctcttgggctccggttcccaatctttctcccgtccccactcttttctatctcacgcttccgctaacatgcattattttcgcgccaattatgccgtggtgatcgccgccacatccgccttctcactcatcggttctccactttccctcctcctctgctcggccgttttcgctctttggttcctcctctacttttttcgggaggatccactcgtgttatggggccacagtgtcaacgatcgcttcgtgctgctagttttagctttcctttctgtgctggccgtctggatttgcggagtatttcaaaatttgtccttagggttagggattggggtcctcgtctgcggcgtccacgctcttcttagaaactccgatggactcttcctcgatgaaaacgacgccgtgtccacaggattggtccgctctgctccatcgactactacaaatttgtagaaatttaaaatttcttctcatttttaattcaaaattgtgggtcaaagagtcggaattgagaggttta

SEQ ID NO: 14160 - DNA, 560 bp, Gossypium hirsutum
tgaagcgtattcttccgaaactcttcttcttatagttgatgtgatggaaggtcattcggctatagcaactaaacaagcagctcagcaagcggttgaataaataagatcattgcttgaagagttcaattgctacaacaactcgaaaggcctttgactgacttaccttatcgggaacttctcttgagtgcgttagacttcgtatccatggaggctccaaaaggaaaccttctctctctggctttcatctccttctcttggaccacgcctcccggtctcattgaactttctttcggcaatgatgaagatctctttgttttgaggtcgacgaagatttgcattccattaggagttcaaacagactattgacagatcggagaatagaagaataggtaacaagtaacaagttgaaaaacagactatccggcccaaaaaggattggtagagtcgcccataactagaactctcgaagaaccggaaagaggaaagatctagaatagcctgttgttattccatcttcgagtcgagtccggatagactccctcggctaagagacttatctg

SEQ ID NO: 14161 - DNA, 682 bp, Gossypium hirsutum
tgtggaacgtaaatatggtattatagtaaagaaaaccatattgagttgtggaacgtaggtatgatatttcagtaaagaaaaccatactaagttgtgaaaagtaggtatggtatttcagtgaagaaaatcatactgagttatagcattgtaaaggattcaagcaaatcatggcaccgggcaaacgacctactcaaatccataagacggtccttaatttgacaagtatttgtaaatgcaattgaagctaaatgttggaaataagttggtatctgatattgagctagattgagtaaattcattgtttaagatcgtggttggcaagaaatattgtattatacttgtttattattattgttagtgaaattttggtaagattttattatgagcctatgaacttactaagctttctgtaagcttatatgcgtgtgtttattgtttcttgtagattgacgtatatgtgttcggaggatcaggtctacatcaaggatcacactattcagatttacctcggtagattttgttaaacaactttttaatttatatggcatgcataggggttgaagtaaaaagtaatagtatgaatgattaagtatgcaaagtaaatctgaatgtgatggttgtgttagatattgaaatatatatgttttagcttgaaacggttgattggttggactttattaga

SEQ ID NO: 14162 - DNA, 526 bp, Gossypium hirsutum
tatttttcattgaccttctatatatttcttcgatccggaatttaggtatcctaatactcttgttcagatatgcgttagacacggtttagagatacttgaagaaaactgatgaatccaagactcagagaagcacaggcttcatacataatggtataaggaaatcaatagcatacctgaatggggaaaaatgttagcttttcgaatccaagatattcgattcctccataacgatttggtgtattaatctcttgcacatggaggagattctgcaagatgaaaagagcccatgttagtaaatctttattaaactttgggctaattaaatgttattgaacaagcttctaaaacagcaactatagggttcctcataaaataaactataaactaatgctcaagtctgataaatattttaatttttagtctccatgtaattcaaataaagtatagtgcatggccgtggaccggctaaaattttggtttaggaacagtgataaaattaatggttaaaacatgacataatgccctg

SEQ ID NO: 14163 - DNA, 640 bp, Gossypium hirsutum
atctgcatagtattgtgtccttatagtccagtaagtgcatgcaacgagatcacaggagatttagttgactcgccttctaagccattctcctcaaacttgtccgagcattcttggaattcctccacctcactgttcgacaatggttccaacaaaaattggtatagttgggatttaacacatttatgcgctgcatggtattttgccccgcaccaaaaacaaagacccttttgcttccgttcggccatcaaagctggtgaaatggactgagatgtcgacttactgcctggcaaactgctaacagactgagatgccgaacccacccttgtaagagatgaagagtaccctgatataacagaagggttaggaaaaggccttggtgaattaatcattgagggtgtagatttccttgctggggaaaggagcacctcaatcttcctagctagttgaaaagcttccatcaaagtagaaggctcaaacaaatccaagtaatggccaatatcagtcctcaaattactaaggaaaatactaagagcataggattcaggaagatgtaattgatttaataaaccaacaaacatgtcttggtactgttcaacggtaccttgttgcttcagattcaccaactccttcataggatttc

SEQ ID NO: 14164 - DNA, 370 bp, Gossypium hirsutum
caataataaaagcttgtattaagatcaacaaccaaccaacgaagcaatcaactacttataatttaatcagcttcatcattatctcctaacactacaatctcaagcaagggtcccaactaccttgcttccacctctccaacattatgcatgctatgtataagaggccagcgtgtctcattttctagctcccctcagaatcttatcatgcacctagatgttccctggttgtcttagatggagataatttttttttaaaaaaaaagtatgaaacatatctgtatctgatgcgtttacagtggaatactagtaaaaatatagccgataaatatcaagtaacaaggagagagacctaaaaagaagcaaaaaaaaa

SEQ ID NO: 14165 - DNA, 635 bp, Gossypium hirsutum
aaatatttccatatttttctttcatacacttgtgagctttattttcattctatttgctcaagcatttttcattgtaattgagcttaaattgcaaaaacttttatcttataaagattctttgtttgtttgtttatttgtatctcttaagagggtttgcatcttaaggttttggtagaaaccttaagaaagtttgtaaggttaaatattgttcttaaaggttatcaaattagtgaatttgggaaaatccttagttttagaaagctaaggtagtggagtacttagttttagaaagctaaggtagtggagtaggaaattggggctgaaccactctaaattattgtgttcaattttctattctttctctctcactttctgatatgatccgccttggtgctgagtcaagtcgtatttgtggtgtcaggtcgtctacaatgaattaaggaacaaatgtatagctaacaaataaaattgataaaataggctagatactattttataacaacaaaggtttaggaaaaatggctaagaatggatgtgttgggttatgataaattgaaggaaagaaaaaaatggctcaagaaacaagtaaggaccaacactagtaagtgtcgacccaacacttatacgtttaatga

SEQ ID NO: 14166 - DNA, 565 bp, Gossypium hirsutum
  misc_feature (62)..(62): n is a, c, g, or t
  misc_feature (510)..(510): n is a, c, g, or t
tatctctcatatatctgacaccaattacacgcgtgttctaaataaaaaatagggtaaatttntttccaggtcattagagtatttgtaagtttatattttagtcacttaatttcaaaaagttacaaaatagtcattgaattattcgaaaattttcatttaagtcgttgaactattcaaaaatctttatttaagtctttgggttgtggagttttgtttcaaaaaagtctagttagcaaactccaagtgacgattagataattaatatggcggatcaatacccatcaactagtagaataacatacattagatccaagttaatctaacagtcaatatttatgattgaagaataaagttgtttagatttttgttcatatattcgggacgttcaaaatttttttacaaaaaaaaaactgaactataaaaaaggaggagaatgatgattgttgcgggtagtgcgaacatataaggtaatacaagagtgattttcataacacagtgacttaaataaanactttcgaataatttaatgatcattttgtaactttttgaaattaattaactaaaa

SEQ ID NO: 14167 - DNA, 652 bp, Gossypium hirsutum
tggcagtctgaataccctgaatacactccattgcttgtgaagatcatggaaagtttgctctctcgtgacaatattgatgacaacacccagcattatgatgaggtgagttttagggaaagcagagtttggtatgtaaacattgatgcctctcttatgtctgcttgggaaagtgtcttgttgaggttgcccattgtttcattgaagtttatgtgcttggcaagacgtaccggctaataattaattctagctaggagtttacagatataaaagcagaagctttgagacaaataatcagggttttgtctgttcaactttacaatattccaaaactaaaagggggaaaacctaaactaaaaataaattttcttaatataatttgaccatgcaggttatagatgcagcaaatgaggtgattgatagtatagacagagatgaactggcaaaattcttgtcactcaaaagtgatccagaggatgaggaggctgaggtactacttagattgcctgtttgcctttccccttccccttccgttaaccatgctgtacaattccatttaggaattcaggaaagtatattatcagaattgaagtcactaaacatgctactttctttttttaagaagtttgattctctttagtgtgtcatccatgca

SEQ ID NO: 14168 - DNA, 671 bp, Gossypium hirsutum
cattccgtaagtggtttcaattcccaaacacgacaacaacttccgacaacgtttacggaggtggtgcgcgaatcgggcaagaaatcagctacgaagctccggctgggagtagcatcaaggtcaagaaatggtcaagggacacagagagttatttgactaacgacgatgaacctcttccccttcccatgacttaccctgatacttcccctgttggacctgaagaaatcgataagcgactacaatgtgaccctgaaatccaggtcctttctttataagctttgaattcagttcgagggaaatgtttcagtttttagggattagaattggttaatctttgatgggttttgtttgtaggattgtaaggaagtggtttatgaatggactgggaagtgcaggagttgtcaagggactggacttcaaagctactataataaaagagggaaagagattatttgcaaatgcataccttgccttggaattggtaaattttcttcttcttggtatcaaatttctacttggaagtgtgtatggactatctgccttttcttatgaacggcaatgtatgctgctaggattttgagtatcaatgtctagtgtcctcttccattttaagttctgagactagtcctgtttgggccaggatgcaggtaaagccctcccaacaattaaca

SEQ ID NO: 14169 - DNA, 580 bp, Gossypium hirsutum
tataccatacagtcatccttaaatcagcctaactaccttacaccataagcatccaccagagagccactaaaataggaactcacaattccaccaaaagctgaagatccccagcatagagactgaagagaacccgacacgctttgtgactccccacgagccctctccacaaccatggaatctacaacctacaccgtgtattaatttctagcataaattcagaaacattactagaatatgaatagcataaattgctttttcagacaaacatttaaaatgcttctggttgtagtataggcatgaacatgctcatggagtcatgcgcgagttgccaatagaaactaacaatcagtcacaacaaattcaaaatctactgaagtttcttttttttggtttaatgaatgtgttagaacaagactttgaggaatttttatgctttacacttgagcccaagcatgcacaaagtctcaggctctcagttcctttacaacttgtaaatggattaacttactattttattctccaaaacaacctttgcttgacatcaattcatgattaaattaacaaatataggcagtcgccc

SEQ ID NO: 14170 - DNA, 595 bp, Gossypium hirsutum
  misc_feature (456)..(457): n is a, c, g, or t
  misc_feature (520)..(530): n is a, c, g, or t
  misc_feature (539)..(539): n is a, c, g, or t
  misc_feature (554)..(554): n is a, c, g, or t
  misc_feature (556)..(558): n is a, c, g, or t
  misc_feature (562)..(569): n is a, c, g, or t
  misc_feature (571)..(576): n is a, c, g, or t
aaaaaccaaagcctccgcccctcttatatttctccgctcttgtttagctcttggggttttctctctcccttttttttatcgttatcttcgaaaatctctaacaaattttattgaatttcatgctttataatattgatgtataagcatccatcgctcttctccatctcctttttcaggtctcctctctcgctctctcttttggactgttaatttttctatattttacgtaacctaatatctgatctgctttgaatattttggattctggaacaatctttgattttcgtagtttaggggtatgattttgtgctttattatttatttattttttggggtgttcctttgtagttattgaaagtagagaagtagatgggaaatggaaaatataatatcgattttgccttccaggatttttcggcttttgaacggagaaaccacccttctatcttctatcannctcaactctgaagcggtaagtaatgattattggtattgtgttttgaattgttacttgtttaannnnnnnnnnnaaaatgatntctgattatggtatntnnngaannnnnnnntnnnnnnagaacctattaagattata

SEQ ID NO: 14171 - DNA, 650 bp, Gossypium hirsutum
caatatttctcagtcatgggagaaacttgacgcgtgagtatttcctttctgttattccatttaattagcttgtcctggatcgtatcttaattaaattgcaaaattttatgatctgcagtggtggtgttctatcacattcatttgaattagaggccaaaaaacaagggatgttctatggtgccccagcagttatcacttttcgcattcccacaaaggctgctctacaggtttgagatccataaaggagtctattttcttttcttaaaaatttaaggtgaaggaaagaagaaaaatatgaacataatttgatctgtgtgttttaggaggcatattcaacttcaatcttgccgttagatgtccttgcagaaatacctcgtgagaagaagtttgagtgggtaagttttgtttacaataacaataagcaaggaattcaaagatattgaatatgttttccttctttccgtgttactaaagcctgtttgttttgtttttgtttgtcttttgtggaacttgtatcaaccgtgactgaatattgaaggctaaggtatgaatgattattgctatattttattaaaatagtcatatgcttctagaatctggatatcagaaaatggaagatatgcatgcagagagtaccagattgggttcat

SEQ ID NO: 14172 - DNA, 634 bp, Gossypium hirsutum
atccaaatgttatcttcgctgaggcttgtttccgtatcaattctttgacaatgttgtcaaacagtagatgaattgaagggataagaaacaatgagctaactttctgatgtgtacaagctatgcaatttgttctgattagacctttgaattatctgcaaattgctttcttctttagcttgtcaattaaagctcatctaattgcatgatgctcgtaactggacatgagtcatactattgttcttatagttacattgtaatcatttatacgttcaaatcatgagttggattccatatgaaatcttcttaaagttctgcctaagtctgatcatggagatatgtagcctctgttccaaaggaaactttgatgtagacaggttcttctagacataaccaacacagagacgtgctactcctttagacaactatttctatgatgtactgttcgatatcaagataacagtgacaacttgattacttggagagttttgtttcttgaggttcattggaaatggaaagtgattgcagcatgttgtatgagataaaaaggcaatcacgagaaaacaaaactagaaatgattacttcccataggtttttcttctgttaccatgtcaccatcacaccacagatcattca

SEQ ID NO: 14173 - DNA, 490 bp, Gossypium hirsutum
atgtttacggaagatttgagctgcaacacatgttatttttgttttatccaggcccgataaaattcttaaaaatatttcagaataattttaactttttatgttagtgtggatgcttgatttaaaccaaaatatattttctatgatgcaatctaatgaacaataatcaaagtcataatggtttgatccaaaacgtagaagtcggtatcctaatccaatctagtaaagctaagccttctcgaattaggcaagttactcaaccatgaacatttctaactaatccttttatgcaaatatatattaaagtggcaattaaatttgattatttagatacgattttacttacaaccagtcctttgaggttaaatttcgactgcttggattgcttgttgtcgtcgagtaaagcattagcaagatttggtacatagtgtcctgaaataaaatccacagatttgattatagtaacgaacatgttatattgtttgtattgttc

SEQ ID NO: 14174 - DNA, 605 bp, Gossypium hirsutum
gtcgagatatattgggccttgcccatattaacacagttgggcccatttcaatacagttggcccataacaaaacagtctcatatgattaatgcatgataaccccatccaaccctgcacttgcctccgtccatccctacacttcctgtggggaataaatcacccacgccatccctacacttacagtgttagcaccggttgcggcactaactataatccgcagcaaagctgcttatatcagaatatgtggcacagccaccaaaacgggttcttcctccataacaaaacccaaccccatgcagtatgacatgtatgcagaataaatataattaacaaggcatgcttcagaaagacagtcaaattatagcgtaagaacaattatttaccctctaggggcgtaatcgtaaacttacccctttaagggtattacggtaattctaccttacagaggtatttcagtaattttatcactctttttagggtttcatgctcattacagttattaacgtgttttcacaaaaacttaccgaatgtttttattgaattgggcccgttggcccattaaacccaaatataccgaaaagcacaaaattgtgcactctgcaaac

SEQ ID NO: 14175 - DNA, 632 bp, Gossypium hirsutum
gtatttatttataaagggtaaaatttacaaccacttctttcatttatttgccactattaagtttaaagttgcagaggcagatacataaaagcggcgtcagattatagtaattctcttgggattgtcggctcatccacaccgttacttcttttttcaatttgttcatgctttgtcattttttttactttgttttatttgattatttacagttttatcgttttgctgtcttaattgtctttttaagtcaataaaatcccaagaccagcccaaaaatgctacttttgttttcatattatactcctatgagactgagaaacaaaattaagccaaaaaaaagcggatgaaaaaatgaaataccttctcaaaaagagcatcttgaacaaaaataatgtcacttgtaatggcggaaatgacttgtcctgttgaagcttcagtatcaaataagcttatgtcttgatttagcataaacttgagatatgccatcctcatttttgctgcctgtcgctctccagtatgcatccaacaagccacctctatatatacatgtatatcatcaaaaaaaaaaaaaaaaaaaaatttttaaaaattaaggaaatttttttccggggggggaaaaaatgcccctaaccttt

SEQ ID NO: 14176 - DNA, 639 bp, Gossypium hirsutum
  misc_feature (53)..(53): n is a, c, g, or t
aatagattgataggcaccaagaaccaaaaataccaaatgcttgttaatgtttnagtaatctaacacttcaatagtaatctaaggagttcaataccggaaaaacagataccggttccgcaatgacatttccgattctgagtaaatatatatatttcagacaccacagagcagtaaaagaataccctttatgaatgtaactttgtaatctaaaagcttgttgagtaatatgaaatggcagattccaatggaaccctatctcttgaactaatctacagagacttactggctattacagatattttattttttgatcccttaaaaaattgctaagtccacaaagattgatagctataattccctaaccccaagtttctttatctttctttgctgcaaaaggtaatagttacaaagtccacattcaataaagtaaacaaagaatgaatcactttgaaatatatatatatatatataacacaaaattttaatccaaaagaaacacgatttacaaaaaaaaaaaaaaaatttaaaaaaaaaggggggcccgggggaaaaggggttttttgggggggaaaaatttttttgtttttttttggggggcccggggggggtttttcaaaaccccccccccccccaaaaaaa

SEQ ID NO: 14177 - DNA, 626 bp, Gossypium hirsutum
  misc_feature (49)..(51): n is a, c, g, or t
  misc_feature (53)..(54): n is a, c, g, or t
gttggtgcagcttctttacgaatcaatgttccatagcgagccctttcannntnncaagtctacttttaactcttcagaatcatggtttactagcatcacacattcggttttcattaaaactagaagaaaatcatgaattatatcatgcattttgtatttcataataccgctgtctagttcatcccctctaaaatcctgaaaaaatgaacgcatatgtagctcatcaaaatattcctcaccaacaatctccatctcttcacaccgcactcccttcaagtaatcttgcgccatccacagcttgatcaattcatcttttcttaagatcatacctttcggaaagacagcacaatatgaaatgcactgcttaagagccaaaggcaactcataataactcaaaaataagggagggaaaagatcttgttcagcctcttcaaagtcccacatttcactatccaatacattttgccattgttctctggttctcttgaaccgcaagagaccacctagaatcttcgcagcaaggggcaagccctggcacttttcagcaattttccaaccaatatcatctaaattttcactttcctctcttgtcctcccatagtatgctctacggctaagtaatgacc

SEQ ID NO: 14178 - DNA, 651 bp, Gossypium hirsutum
cgggataaaggaaacccctagctccatgagcacttctcaacatcaaaacagccccagggttcatgtacttagccaaatgttcaacgactcggactttttcgtctttgtccatcccaacaagagctgctaagaaaacgacatcgtactctttcaaaccattcgtgacatccattatgtctgtggtatgaaagaacatccgtcgagacaaatcgggatccgacgagactaatcgaagagctttcgacttagccgaagggtcgatatcgtagttgtggaacgaggtggttttaaggtggaaagaagctaacacgatcgaagtgaggggaaggggaccagagccgacgaaggcaactttgttaggcacatttgagcagtgtttggtgaggatattgaattcgagttggctgagtttaaggtagtttgtgtagtaagggaaaatattgagatggtgaagtgggttatcataggatgctaagatggtggagaaatgggtttctaatagtccctcggcttcaccacatagtcgaatcaatttggacctcatctgttgaacctttttgcaaagcttggtgacatcgatatgggtgggtggcatgcatgtgaggacgagttgggtgaagagcatgttgacatctttggagggtttgaaac

SEQ ID NO: 14179 - DNA, 638 bp, Gossypium hirsutum
caatttgtaagaaattcaagtaaaaagggaaaaaaatcaatagtactgtttaattttcctaaaaactgggatggagattgggattttctatgatgtgcaacttctaactcttcattttcttgaagcatctcacacatttttggatttgggtatgagatataatcctccaattatcctctgaatacataaacttaaaaaaccaaatacatccatgtcggacaaaatacgagtatcgaacacacaagttcgagtatacaaaatgactatggtatttgtaacaaaacaaaattagtacatttatgaggaccataattagtgttaccttttaactttctcctgcttctgagaatgtaacagacgattaaaagaaaccccaaaagcgcagcaattaccgtcccaagtatgatggcaagtttcaccttagcctttttcttccgttctgccattttcaatattgataaagaagcacaaatattaattctttattacacaaaaacccaaaaagtattatcacaagatgtaataacatgttgtagttttataaagcagtacctgcttctgaagcagacactctgatgtaaagatcctgaccatctgattgaaattgtttgatatcaagcaaatctccataccacatg

SEQ ID NO: 14180 - DNA, 595 bp, Gossypium hirsutum
ttctcggaaaggtttaatagtcatcactcagtcattgcttcgctcattgttctttaataaataaaataatcagaacttctcccaggtttaattcatgatttggcccttaaagtatatttatttttttattttgatatttaaatttttttatctcaatttgatatttgaagtatcgactacttttttaatttgatacctaaagtatgtctctcatatattttttagttcattttttaatagatataaaaataattgataaccaatcacaaaatgacatattgcaactttatgtaaaataataaatatttttatttattaaatgtatatacattaaaaatatgaaaataaaaataaaaatataaaaaatttagaaatatatataaaatctagaaaaatattttttttataaaattataaaaaggtatttaaactatccttgaaatttaaatacatttttaatttttttcacgatttttatttttatatattatttttattttttaaaatctataattatatattaaaatttagcataaaaatgtcacgtggcaggtcaatcttgaccattgatcggtcaacggttaattaaagacag

SEQ ID NO: 14181 - DNA, 653 bp, Gossypium hirsutum
  misc_feature (627)..(627): n is a, c, g, or t
ggtgagtttcttttcttttcttttttcttactaagaaggctaaaacttgattgttgattggtaagctgtgttgatatggttcatatattgatatatatagattttggatatacagtgatccatgcggctttgttattggtttttgaactgaaatgagctgattgatgatcaaagacagagatcatataatttgacccaacgaaaaggtcagtgaggagctttgaatggttgattggccgccatctttcctttattgtgtcagtgatgaagtcgtataatagttaatgggacgtgtgtacaacatattttattttggcttggctgctaaaaatattgcttctttttcaagaaaagaaaacagtaatatttttttacaaaaataaattatcattgcataaaaaaacctcttccattaaacaattttttatttaatttattatttataaatattttgttttttattgataataatttttagattttttataatttcttatttatggaaaataaatgttgtttatattcaattgaccccatgttaaaaattcattaagtcaaactaaaaagaactaatgtcatttgatctaggtatcagcttctataacataaaacaaatataaatattcnaatggaacccaaaaattcgggtaact

SEQ ID NO: 14182 - DNA, 665 bp, Gossypium hirsutum
gagctcgatagcttgattgagttttatttttaaaactaggagtatgagataatgatcaaactaagttcacttgattaggtttgtttatctattaaaaaggagctcgattttttgtgcttgaggttgtgtttgaatctaaaattttcaatactattagaaataaaaaaaatttgtacttgaattggattcactcaaaggttgagcttaactctacaatgatctagtcagattagactttttttttagactcaacttgtgtaacttgcaagtgcaagtgtctcgttgacacctctttctaaacctacttaaacattgactgaggtaccagtatcagatacttttatgtgtcagcttgtctttgtttaaatcttttgactcatagcggcagctaaatggatccgaaattaggtataagtgcgtggatgcctgttataataatgtcttataacaacgtcttaaaaatatataaatacaaataatacattactatttgtaagtaaatatatttatttacttgtacttttattgacatgattttatataaatgattaatatttgaatatcttttgtttgttctaattaatttcattggaaatgtttttatatcattgtattcatatctaaatacaatgatcttttcatgtgaagccgactacttaggagaa

SEQ ID NO: 14183 - DNA, 658 bp, Gossypium hirsutum
ccattgaagattgttaaccgttattttgattattgtctccattttctatttatgattgctatctagtggaataatatcagattaatttttaggatggactctatgatttcaacatctctgacacatttctggagtcgatagaaatatggactagaaaccctcaagaaattttggtattcaaaaactttagcatcctgcagttttataaatgtagcagcttgaagtacatatttactccgtctatgcttttgagcctcaatctactacgaaggatagaagtggaagaatgcagttcaatggaacaagtagttagggaggaggaggaagccatgacacataaatttacatttctgtcgctactctccgtaacaattaagtcgtgttccaactcgacaaatttccatttgggaagtcaagctcttgaatttccagagctgaggaatatcacgatagaggagtgtccaaaaatgactgcattttcttcctcagtttcaagagagagtggtgatgcaagtgaaagcgtggttggcgaagggggcatctatgataacactgcaacttttttcagcaataaagtaagtttggtattcaatatttatctgcacaacttatttcacattttcttttgatttgatcaacatgagtgtgtctggtctaa

SEQ ID NO: 14184 - DNA, 622 bp, Gossypium hirsutum
tttccttgcctctgttcttacacatgtccttttatttgtaatctttatcattctagtagtattattggagacattatatcttgtatgaatagatacctatatatatgtatatataattatcagtgtgtatccttgtccggccatccatttgctgaacctaacaaaattatgcagttaacttaattttgattccataatttgatttgatggcccctccagcttaactttgattaagcctgattcattttcgaaaaaacttatttttgtctttgtgttgtctaatttatgaaggcttaactcaattaagctggattatagactaacaggataaattgctagagtagttataccaaataatttcctttctcatgattatgattgcaattagtaactgaggtccagttttaatattactattctgtgtagggagaccgggatctaaggttcctaaattgcagtattccgagaacattgattccagtatattattattgagagatgaatatgcttggcatatagggggggctctatctcatgaagagctagaggaatggaaactgttgtatcatagttcattaaatggcttaagttttaacacattcctgggcaacatatcgtaagt

SEQ ID NO: 14185 - DNA, 635 bp, Gossypium hirsutum
  misc_feature (34)..(35): n is a, c, g, or t
  misc_feature (37)..(37): n is a, c, g, or t
  misc_feature (39)..(41): n is a, c, g, or t
aggtctaaaattttattcaaatttagttcagatnncntnnntaaatttgagtctgatccatccatattattttattttagattactttttgtatgaaatcaatttttaaaaatatagtatatcaaatatactaaaaatattaaaataaataattctcaaaaaattgaaaatacattgagaaaagtctttatacttaaataacactaaaataattgcaacttagcaagcaaatgcctttaaaatagtagcaaaattaacaataaaataagagttatacaatatctaaacaataacaacaaaatagtagtaatataatagcgaaagggtagcaaaacagcaccgaaacaacaacaaaaaatagtagcgaaacaattgattcgggccgggtcgagctcaggccaaaaaatcctatctagtgcccgacccatttaaaatacaggctttatttttttattcaagtccattttttcaggtttatatttttgtccaaacccttccattttttgagtggacgggtggcccaacccattagatctattcatatccaatgcccaattaaattgacggaaggattttaatggtacaatattaagggtattttactaaaaaagacccatttccaacattatttacgg

SEQ ID NO: 14186 - DNA, 625 bp, Gossypium hirsutum
  misc_feature (528)..(528): n is a, c, g, or t
  misc_feature (563)..(563): n is a, c, g, or t
  misc_feature (569)..(570): n is a, c, g, or t
  misc_feature (612)..(615): n is a, c, g, or t
  misc_feature (617)..(622): n is a, c, g, or t
attcaatcttggaggttcctaggagatgaaaaggatgattttgttcttcacccctctttccatcatgttctttaggctttgcagagcattattctccgttgcggacgctgcttcgactcttcatatttcttgaagcaatcgtgacatatgtgtccggctcatatttgcacatggatatggtcatcacatgattgtttgctatccgaaggatagaattagtacaccttaagttggtgtttatgttgttacatatcttataacattatttcatgtaaattatttaatgaaaatgaaatgatacagtttgattacactttttgttgtccattcttgaaattctttttattttctttccaagaccaagttgggtcagattaaccctaaagcccattttaatattaaaacaaccaattctggcatagaaaattaaagaaaataaaagagtgaagcattaaaaagcattagggatggaattcttgctaaacaaaaaacaatatgtacatgaattctgcggatgttacacaccanttttggcatagaaaaatgggggtgggatcttaaanatttannaactttacatattggatgatgttcttcaatcttcaagcacgnnnntnnnnnnttc

SEQ ID NO: 14187 - DNA, 678 bp, Gossypium hirsutum
gcatcatttacatttacatgccaatatggccaatataacctatacatgacattacaaccataatttatttaccatattgtaacagtttgtcttaggtcaaattgaaatagtgattttgagaccacaaattcaaagtcaaaatatttattttgaaattttaataaggtctacatcatgatagaattattatgtgaaagtttcgtaaagaaattttaccgtttaaatgcttaattcgataaaaaggactaaatcgcgtaacgcgtaaaagtaaagttctattatttaaaggcattatatggttataacttgaaatatgggagcccttgcatgtcaattagacctttaatgacatagtggaagttgttggcttggtaatttttgaaatttttaaatgttttagaagttaaaaatgtgaattgattaataaagttaatattaataaaacaaaagaaatttctttctccattcatatcttctatctgaaattatcaagaataaagccaaagaataggtttcatttggccatttattttttaagctcaattaggtacggtttttcatccgtttttcatgatttttacatttttaaactcgttgctttgtactctaactagcccgtaccttaattttagaaattgttcatgattttataaagtgccattgatgaatacttgagtt

SEQ ID NO: 14188 - DNA, 599 bp, Gossypium hirsutum
ctctaccaggctctgttatctgcatagtttttagatttgtgtgattaaactgtttcaaacctaacacatccctgttacctcgcacgaatgctaagaaacccttagtaaataaggatcagtaaaatgcatatttactaagtaaaggattccgaaaggacctaatgtggtttccaaactcatgaaagatcgagttgccatggaatgttattctgaatgttattaagcatgttgataataaattaagtttaattaaagtaattgtcctagtttatttatgttataattgttacaaattgtgtttaattttgctaaaatctatttcattcatatattttgcatatttaggataatttgcattggggatcattgcatttagtttaatatatttaattttaattatcacttctcaatcatattgtgtttttatttaccaagttgttaatatgattttacaattaagtgatttaacacaaatacaatccctgtggagacgataactcgatacttacttattacttgataacgactatgtacacttgtacaaacctacgcattacaagtattttgcgccgttgccggggattgttaactgttgccat

SEQ ID NO: 14189 - DNA, 688 bp, Gossypium hirsutum
cgctgtcatgagaatttgagttgaatcaaagttatcttctagaactgcaagattcctctatctcatcagtgatcacagcttcatccttaatctaattatcatcatcttcaacagccttactattagtagcactcgacgacccccaatctcgcatgaatttgtctttgaacgatatggactccatccgtccagcatccacaggggaatctccataatctggcggatcatcctctcgaagacgaactttctttgttgcccttccagtgttacctgtagcttgcgtggttgttcattgttgagtgtcatagtttgaataactttaaattcgtagcatttttttcacaatttatactatttcttttaatcgagagattctaaactattatataattctctaattaagtttatgtcacaagttaccttaacactgttttaattaaagaaattatgaaaatactttcataattaaaatattaaatttacttttaatttgatataaacattttgttacctctatttgcgtatattaatattcttttattaatatcatattctatatcttattattaactaatttcaaattaaaatttacatatttctatactctaaagacatgatatccatacataaaatttttaattttaattaagtaaattaaaagtatttatttatttttatgactcatctc

SEQ ID NO: 14190 - DNA, 620 bp, Gossypium hirsutum
atttttgatatatgatgatatttaaaattatttataactcctctgtaatttttaaataaaaagataatcacatttcacaatatttgttcttaaagaatatctataaaattaatcatctttaaaataaatcgataccacttgaatttaagataaaaagagaaggataaaacttctttcaagaaggagacaaatgccaatgtgattgtcacggtcggagacctcaaaaacccgtagatgacccatttgtcgccacaaacaccaacatgttagcccaccttccatctctaacagcttcatcttttgatgtcatcttgttcgttccatgaacccataaacgcctcctcttgtttggcatgggtaacttggatgaggcaatgtacgaaactcttcactgtccatggagaatatcataggtacataatagaattctcacaggatgatttgtttccagtagtaaccattcaataaagagtgttattatgtaatattactggtgatgaatcgtttgggacacgatgaggaaggactccaaggccgacccattcggattccttagagcctacggtgaatatggtatattcaaataataagggtgtgcagcatgacctatgataatgcag

SEQ ID NO: 14191 - DNA, 601 bp, Gossypium hirsutum
tttatttggccctctaactttataaaaaaagtcattttagccctccatttaattttttttaccttttttagcacttaaacttgtactgtttgtcaaatcactttaaaatggatgaaaaagttaactttttaactttactgacatggcataaacgtgaattgccacatagatgaaatgtcatcatttaattaatctttaaaaatttaaaaaatttaaaaaaaaattattttttttttaattttaaaaattaataattaaatactgatatgtcatccacagcgggctaatatctttttagttttttatgagagttaaaaatataattttactattgtattgacttatatatttgtagtttttagaatgactaaaccaaaaagtatcaattttggggggacaaacaataattttactatatattagcatataatttaatcgattttgggaggtctaaaacataattttctcaattcaaggggccaaggcccctacttgcacctttatgccttcaccctagattttaggtaaggtgagacttaaacttgaacactcaaagttggagcctcaacttttaccaattgtagtaggacatcgttgccgt

SEQ ID NO: 14192 - DNA, 601 bp, Gossypium hirsutum
aatttttcatttttttgaatctctcaaaccctagaactaaaaatttggtacttacccctttaggcccattttctcttttcactgcccacactagagaggtcagaaccccattgccaacaaaacccttgattccggtggccaacagaccttcgcataagtcccatgcacctccatcagattctagttgcttcctcatgaccaacgcatgtagctcaccctgccagagtttcttctctcccaccgccatcgatcttgggcagtatttccagcctagccctctgttttgactccatttggtgctggtcagattttttttattttttggcctattgttgggtaactatattggctactgttagccttttggggataaaatacttgttgctaaattgaagggatttgatagacaaaattatagattgtgtatagctgattgattctttaggagagattttctttcttattatatagcttaattttattcaggctgtaaatatagagaacttttatttcttcatactaattcgtcttagaattctacatgaattcttcatagcttaaagcttctatttgcataaagcctacgggagagaagcataaa

SEQ ID NO: 14193 - DNA, 752 bp, Gossypium hirsutum
  misc_feature (61)..(61): n is a, c, g, or t
gatcgtcttttgatatagaagaagcattacctcttcttcttctttgtttgaattttgtttncttttcatgctttaattttggtttctttatctttgatctaagcaggaccaaacagcttaccttccaaaatccgagctagcgcctgaaaaccttgaaaacgttggaaaaagaaaatcaaataaatcaaaagcactcaggcctcagtaccaccgaaccctgttaatagcctgcttccctaaatatttagaccgtggaacaacaaagataattcattagcttaatcaaattgggtatctcttatatcaacctaaaatgaaggtaaaagttgtgtgcaagaagctgtatgactacgtctgatacaatctcaaagaaatagctttcccttcttcattgcctggtcctccccacataaaaaagcgccgcaaattgacttggcacgagcgcttcttggtccttctcttttccattttctcttccgcagtaagagttttgtttgcttattgagttctgggttttaatgatgaatgctgttagattctgggtttcctcccttcctttatataattgtattttttgatggtttatgatggagaagctatattagtactggattgtattttagatattacttccagtttaaagagaagggctatttaaactggaagtaatatctaaaatacaatccagtactaatatagcttctccatcataaaccatcaaaaaatacaattatataaaggaagggaggaac

SEQ ID NO: 14194 - DNA, 636 bp, Gossypium hirsutum
  misc_feature (581)..(581): n is a, c, g, or t
  misc_feature (584)..(584): n is a, c, g, or t
ctccttgcttttttttgcatgccgagggccaaaacaaaagggcaaaaccaagtgaaattagaggaagtttagaactcaggatttttctcttatcaaattttgataatggaacaaaggaatttaattagaatgcaaaaagtatccaacatggtttgatgaaattccattgatgacaatctgatgatgataaaagtttatattaaccaggaattgttttcaaattttaattatgaacacagcaactaaaagattaagatcaataatgtatccttaaagacaattcaaagttagaatcctttaacctccactcccctttcggaaaaaaaaaacataatagatttggtgagggaaaaaggcaaaataagcctttggggccttgttactttggtgggtaagaaaacaaaactccagcctaactcagtttcttgcttctccagtagcctcacaactacttcatgaggtttattaaagggattgcttttttatagattccttacttaaagtagataaattaaagagattcttcattttgttccccttttgtttatttattttcctcgagaaatatgaggtgtttaaangancactatatgtgctatagactacatgttatgaagaaaatatagacctactgat

SEQ ID NO: 14195 - DNA, 633 bp, Gossypium hirsutum
  misc_feature (59)..(61): n is a, c, g, or t
cccctaacccgaggcagttatagatgctataacaaaacttcgtaagaaaatatctcgcnnnttctatgaagatcgaattagatctcaacagggggatcggtgttttactaccaatcacaagttttgtcttgtacgcagtactcgtactggaaattataatcaaggattgctctatcaaccaccatctacttcagagattcctcctgaaacatttttcaactacaagggttcactatcttcccacgaattagtaaattaggtaggattttttttttttacaaaaacaaacaacaaattaatcttcataaattcaatttcatcataaatgcaaaatacttatcttataaaaatgacaaaaaaaaaaaaaaagggggggaaaaataaaaaaatgcagggtcgtttgtctgtttggttagtcaaacacgggctatttcataaatctttgggcttcaattaccaaggaataaaaactttacaaataaagcctgaggattggcattccattgctgttattttatatgtatatggttacaattatctacgttcccaatgggcctatgatgaaccaccaggcgaactgttagccagggggtatcatcttacaaaaataaagtatggggtaaatcaaccgga

SEQ ID NO: 14196 - DNA, 457 bp, Gossypium hirsutum
tcgaaatacctttaaaatatatattataaaaaataaccttcacaaacaaaatttaataaatattaataatatctacaacgtgtaagtaaaaaagaaaaaaagaaaaaaaaaaccattcagttttttagttgaggcccgattgctttggtctatcttgagttcatcattgtatattagctcgtttatttaaaggtaatattttttattaaatatttaaataatattttctatttatttctccatttaaatttagttggtttgtttatttaatattttttttgttggttggcttattatttgtgaatatctttaatgttcacgaatattaacatatttatttataaataagttgagtttaaacaaaaggttaaaagggtatacaaacacaaattaaacatgaacttaaaaaatgaacaaaaaacaaagttttgctcgttggacccgggttcatttacac

SEQ ID NO: 14197 - DNA, 677 bp, Gossypium hirsutum
atgattggataagaaagggccaaaagtctttcctattttagttaagttctttatttctctcagcaaaacaggacttgatagtgtaccgaattcattcgccatgaataacctcgatcattgtttgcaggacggtctcaatgttgatggccataatggttgattttggcaacgggttttccaagcttggagattccctggtttcaattaggcttaggaatatttgtcgcgggagacttacaattttcattttaatctttcctggaaggattgaaaaacaacaatcttccaacaaacctcagaaactgaatcaatactactcagtcattatgtcattgtatgttttatttttttacttttattttgtgtaaaagttagtcggaaattttcatgaatttattttagttttattgttttttttctttcatttgtagtatcacttttatggatcaaaaagtgacaagtttgccttttagctcttaagttgcctaataaaaagtgacacgtcaagttctttcataagaaatctttgtaagaactttttcttttaaatattgaaataagtctaattgccactctagtaaacttcttttatcataaaattaattacaaaccatggatagtgaaatttgatgatagtattttatcataaaaatggggtctcgactaatcatgttgtc

SEQ ID NO: 14198 - DNA, 579 bp, Gossypium hirsutum
aattgttacaagcgccttgttgtgtaaggatagggagacaaaattttagggcagaaattttgggaagtaatttttgggataataacttatcggatattaggaagtagaataatctaattttgggatggaatctagaaggaaatcttgaactgagagtggaatttgagtgggccgaaccaggattcaatggttcatgattcagaagacaacccaatggaaggccgagaatgcaagacaaagccaagaccgtctatgaagtccctaatatttctggtcatgcgaattgttcagtgggtaatgattagcattctcacacccaaaacataggattatcgattctcaccaatgggcaggccgaccgaatgaaaattatgtgttggaatgttcgcggattggggagtttgtgggccactaggaaactttaccatatgctgaagttatatcatccctaaattgtcttcttcatggagaaaaaataaaacttgaacaaaatggaaagagttcgtaggaggtttggctttcataattggatcgatgttccaattgaggaactagtggtgatctttgtctaggatggaa

SEQ ID NO: 14199 - DNA, 683 bp, Gossypium hirsutum
ggttggtaagctacatggaaagagcacattttcatgttacaaacatatttagagtgcattatgaccaccttggccacacttcggatgggtttatcttacatcatcgacaaatatgtaagatttcatcgtcaaggtatcatatttggttcaataatgtgatactatcaaaacattgctaaagtttggttgatttgaggttgggaaggagttttataggtcaactaagactgaaaaatgaaaaaatgtgagctatgaacgtgtcggagttgtcactctggtcgctctttgatgctgaagttaatggagtgacatgaacagaaaaatatccatagagacctttttatgctagagcccaagatgccttgggattggctcctgattttgtccttgtttgtagctttcctaagttaagaaggatgaacgagtgaagtgtgtctcgtgattgtttggatgccattaacacatcgtatgccagttcgtatctgagccacgtcatgtagagcagaacgatagcttcattattgttgatagttgttttgagagcagcaactatctaaccattgcgctacaaatacatattgtgctgattctatttgggcttttatagtttgtaaagttaattggaccaatacgtttaagaggtaatcgggggactaggttgcattacccagttatcgtggagt

SEQ ID NO: 14200 - DNA, 627 bp, Gossypium hirsutum
  misc_feature (62)..(62): n is a, c, g, or t
atgtgagtataagatagggttcagacgtgctgtaaatctcattatccatcatgttaatttcnataattccatatattttcaccgagatgaagcaacaaattgaggtttgtaagggtgtaacgaatggtttaagacaggatagtgtcattgagaggataaaagaaatctgttgctacttaacattggaatcttgatctcggtttattcattttctttgacaaatgatacataatgttctttttttctgcttagatcttcttaatgcacatttggttacgtagcactctggattttgtcctagatctttgtctcattatacttttttaatgccattagtttctatgtttattttcagaatataatcatgatcatataactaaaaatacgtgttgctgatgtaccatcctaaaattgcaggtccccggtatcttgttcacacccatatgtccgcattcattatcgtttcgacccctgatattgcctgagcatgtcacattgcgaatagtggtgccatttaatagcagaagtccagcttgggcatcatttgatggtaaggacagaaaacagttagctgctggggatgctcttttgtgcagtatggcaccatgtcctgttcctacagcatga

SEQ ID NO: 14201 - DNA, 549 bp, Gossypium hirsutum
gtcacgggtgtccacattataaagtcacttgtatccatttatgaataaatgttggaacatatcttattttctattttcatcttctctctcgctgctctaaccctctccctccatcatcatagccaccaacctcgaatgacaacttcccattcagattctgatgacaaaacacttcctctttctctcccatttctttctctttactttggcttttagcttaaaatttccccaaaacgatgctcaccactcaccactcaaattctcttttgcccactaaaaccctttccctcaactctctatcatctttttcttttaccctttgttttctttcatcgaattccaaggggtttcacttgctttaaagctatcttagatacaaatatacatatacgtacatattgatagagtaggatagtaatttcgatctgagagagaatgatgacccactttctttccttgttcaaaacttgctgcaaatggctctttgtggatttgtcatcaccgataccatcgaacccaaccaccccatcgtttatgtcaacaccttga

SEQ ID NO: 14202 - DNA, 688 bp, Gossypium hirsutum
  misc_feature (674)..(675): n is a, c, g, or t
gaatcagttactccatctagcaatgcagcagacctggttttacttgaaacttgcaagcatccattaacttcaaaagatgatggggtgccatttttggtacaaagaggctggtcctcctccatgtcagtaatgacaacacctctaggttgcttgcagcgaggacgaggcttatgtctagcttggaaacttgcccttcgaatctctgcagaaccaaggtaattagatcaaacaacaaccaagttaccgcaactaaagttaactgggcacatataacaatatgaggcaaaatgtacacaaacacatgagacgatcattcacactacatccttaaaccaacggtataaaagtttttgtatagaaaattaattgtacatagcaatatattatctcaagaaaacaagattgacacttctactagagaaaagcaataattggaagagaagtcttcattttcttttctcagtataatcattagtagtaggatcatccctgtctttattggagtattccacaagtttaactgcaatgccagaggaaaccctctcacccacttctaaggcttcggagatggaattagttgatctggctagcaatgcagtggtccttaacttgagcacaatttgcagcaactaagtggatagggtgccataattgctgcaaggccaacctcctcnnagccagcaacatt

SEQ ID NO: 14203 - DNA, 655 bp, Gossypium hirsutum
tggaaatttgagctaactgagggttcaatcggtaattttgcagccatacatatatacattctcgatattgttatttactttgctccaaaaattcccgagccaccgtcatgtctgtaccgccaaacaagtctcttcaccaccactttgttccagtcaccaatttgcttcaaaaattgaggttgtctccaaccaggccagagaatgatttagagaggactgtgtggtcttccctatcggaccttatctttttcatcggcgactccttttcttcagtgtcaactttagcatttttattccgaataccacaaataagatgatcaccgatctacaatatttaagcagaaacaattagtaatctcaaccctagatgaacaaaatatattatttaccaaatcaatcaaaaggatgatacctgtttgttgtggtcgtcaacaagctaaaactcatgcatgagccaatgtccttttacgtcttcgctggagcccttcacctcgaaaacaaaaagtttccgattcccgattttcttctcgcccacactcagctactcaatcaatgtttttgcctttactctttttcttcaacttggtgaaaacgtaaaaagtttcggatgaagtcttatcgaaaatcttctaagactctttaccttcttcagggc

SEQ ID NO: 14204 - DNA, 660 bp, Gossypium hirsutum
tttggagccctaatctctgacacccatgaaccccagctcctcattcttacacccttgtacttctttttgcataatgatgatggtggtggtggtgatgatgatgatgatgatgatgatgccatttgctttgactgatgtggttggatcttgtgctcagtcttcaccattggcaaagtttgcagattgcagattgcagaatactgaagcaatgctttagtagaaggatgaaacgtgctttgtgtagcttttgggtttgggtttggcttctttgttctgttttttcttttctaaagtgatgaaagcaatgaaataatgatacaagaactgaatgtgggggagaaaagaaggatgttgctttactatttatagatggggggggacttgggttttcacacttggaaagatccatttggtcaataagtattgttccacatatgaatatatatggtcattgctgacagatattaattacgttcctgcttcatggtaaaaccccacagttctccccattgtctgcaggtataattaatatattctaccaaacatgtggaattcaaatatgattaataagaactgtcaatttgcaaacttttaatggaagagggagttgacattaaattttaactttaatctttaacacccttaatcgttcccttgtaa

SEQ ID NO: 14205 - DNA, 653 bp, Gossypium hirsutum
  misc_feature (613)..(620): n is a, c, g, or t
  misc_feature (622)..(622): n is a, c, g, or t
  misc_feature (629)..(632): n is a, c, g, or t
  misc_feature (638)..(641): n is a, c, g, or t
tctggagataaggcacttaaagcctgtaaaagaatcgatagaataaagctgaattcttgtggttttggatttggatggtcgttaatggagagaaatggaaatggaattgcgtaataagttgggctttaatgtatgatactttggcatggaaattggtgttgaaagcctgttttaatttttatacaagggagaaatggtgcgagtggggtaagcactgagcatctctttttgttctttgtggggataagggaaaatggtagtagtagtagaggatcaaaagcaagagacaaataaggtaaagaatagtagcacttgccttacctctctattttcaaatttcaaaagtttgtgcagcaaatgagaaggggatttgatagacaagcaccaaaaccaacaccatcacccattcaaaaattataatagcaacaataatttacatctccaaacaaattaaaggagggggcattagcaaaggaatagcatatatgtaagattgcaagtcaatgccagttataaagatcactagaacccttttagttatattcccaaagcaatgataaacttgaatgctcatagattatgtgaagtgatgcaaagtcaagtttctccaagnnnnnnnnanataactnnnngggtcnnnntgctctttataa

SEQ ID NO: 14206 - DNA, 144 bp, Gossypium hirsutum
  misc_feature (59)..(62): n is a, c, g, or t
  misc_feature (64)..(64): n is a, c, g, or t
tgatcgtacaccatcatcaggaaagtatcctccattcagacatgggcctctatcccatnnnncntgtttattttcagacacaggagggacagacacaggtacccaaactccagtttcttcagaacatggggtatcatagtaaaa

SEQ ID NO: 14207 - DNA, 678 bp, Gossypium hirsutum
tggaactgctcatctagacccataataagtaatgtatcaagagagtctattattgttgctccaagaccaccaaagctattctcaccactctgagtctgaggctggtatatgacatgaaaaatcagccaaacttagtgtttttatgataagcttgtagacgggagtgactgaatgacaccaccaaaacaacagcctaatttttgtttaggatgtgaaattatgacctaactaaatgaatcgattttagaattcaaacaagacaaacttgagcaaacatataataaaagagatcaattttaaacaatttgagggtgaagcgcatacaattccaagttaaaattttctttttcccttcctatcaatgttttcaatgattaaaagttcaagcctattgcagaattgacaacatgagttcaattatacttcgttgaacttttgaaacattcgcatactttttcaaattcagtgctaattctttatccagaaaagccgcaaattataaatgagaaacccactcagcatccagccaaaccatcaaacaatttcttatgacattcagctagaggggcgaaaccaaagtaagaaatgtcaagagctgttctctctaccaaaagttaatatgccaacaaagcatggagtcatgcagcaatgcacaggcttctagcttcagcaaagaat

SEQ ID NO: 14208 - DNA, 613 bp, Gossypium hirsutum
tgaacgaggctggcaaacaaaagagatcaatgcacatacactactccccacaagcgacacaaaaacaccaaatcccggaacgaatgacgccaacactgccaacacaattaccagaactgcactgcccatgtatattcccaacttctctaatctaattgtcgattcttcagcatcattgttgcgaagcttctcaaaccaaatgttcttcttcaacttcccttccactatttcactaactggatggaccatgattgggaatgtaaatactaaccccaggcacaagccaatctgttccaaagcaccacaagttctgtattatgaatttgcagcaccaaataactggtttgattcaaagctcagttttggcacataaccttgaacactcaaaagaatatgtaatctaaatgttatgctatgtgtaagatatttgtttagcagtagatatgcagtgatgttacaatccttaaggtgaataaaatctaaaactccgtatggttttaaagttttcggttttttttttcatccctctgctttctgcctagtcagtcaagggctataaaaatgatctactaaatattttttttttcttaatattatatcctcaaaaaggagg

SEQ ID NO: 14209 - DNA, 729 bp, Gossypium hirsutum
  misc_feature (662)..(670): n is a, c, g, or t
  misc_feature (676)..(686): n is a, c, g, or t
  misc_feature (689)..(689): n is a, c, g, or t
  misc_feature (691)..(691): n is a, c, g, or t
  misc_feature (693)..(695): n is a, c, g, or t
  misc_feature (697)..(703): n is a, c, g, or t
  misc_feature (705)..(705): n is a, c, g, or t
  misc_feature (707)..(707): n is a, c, g, or t
  misc_feature (710)..(714): n is a, c, g, or t
  misc_feature (717)..(722): n is a, c, g, or t
agatctcagcaatctaaagctatgttgctcaaacttgagcgtgtgtcggatatgcatatgtatctaacatgaatatggttagatttttctaagttttccatgtatctagaggatccttgaaggccaacatgagtttcgaaaatggatatttcaagaaaatcggagcccaagcaacacagctctaaatatttatgagtgtacatgtcaccaaaaagatgaagaagttaataacaaaggggcagtaactagcttgtttctcaccaacaaagccttttgactctcttccacagcaaagctggctaaacaagttcctgaaatttgttaccaacatgtatttgtacctaaaattctagtcctagttcaaatatgaaaagaaaggccaatgacttttttttagattttttgttagaaaaatataaacaatatgaaaattttaaaatgacctaaataagattattcaaaataatagctctccatgtttctagtctagtggaaactagactatgttgtcttgaccttcatgttcttatcctaaagatgaaattcagttattcttgttgagaacaaaaacatcaagtttctttttagcccaagattaaagcttaagtttaatacgaaggaacctgcaaaggaaaggcatacagaatgttccatgagggagnnnnnnnnntaattnnnnnnnnnnnttncntnnncnnnnnnnantncannnnntcnnnnnnttttact

SEQ ID NO: 14210 - DNA, 610 bp, Gossypium hirsutum
caaatttcaaatatcaccaataaatattattttcatcataaaagtcttgggaattgaccaaattaccattttacgacaaaattttcattttgccctttgtaatatttcttctcaaattttgatacttacacaaaatccagctcataaattatcatatatctttattataactttatgagtaataaaaatctcaatttgactcttttcccaataaaatgggaaaattacaatttagtctttatactattcaattttttcaatttagtctcaaaagtaatttctatctcaccacatcactttccaactcattctgtgtcaattaatctatcataattcatattttatattttgttaaattttacacattagtcctcatactcttcaaattttacgatttgatcctttttgtcaatttccaccttcgcaactcctttcacatattttcacctccaatattaaatttctatcccgaaaattctttatttgggtcaatccataagattcctcttaatttctcaatatttgaactcaaaattatgccacgtgtcatatcagaattttcgaggtgttacacaaacttaggccaatcccaaagacctatgttcaccat

SEQ ID NO: 14211 - DNA, 660 bp, Gossypium hirsutum
caaccttcattaccgataccattggatccacttcatcttgcaggagtccaactacagaaagaacctgagaggccacataaaataggagagcataaaactttctttccgaaaacagggaaccagctagaggcaaaccataatatctttgaaaatgctaaaatatttaacgaaagaatagatgcaaaagcctcaaaagcaagaacagaatgaactcattaaaaaacaaggtgatgtgaactagaaattgcaaccacagaactgaaatgtattctcaaagtctataatatcatccaactaagaatgcaaacaagccaagttgataagccaaatacaccaccggattgagctctttcctaagattctaatcattttttaaacctaaatttgatcccatataagaatcatcatgattaaaacccaactttctaccggtacaatttgaaaatgaattctttcctattcaataaatcaataatcgtcaaaaaagaaaaaaaaaccactaaatctaatcattgtctaacaattgccaaagcatttgactcagaaattgtatattaaaaaattgaacacacacagatcagttttcaaccaacaagaaaacaatttaaatgccatgtcatgaatgttggaaaattttacctaccatggactctaaattcc

SEQ ID NO: 14212 - DNA, 648 bp, Gossypium hirsutum
accctttaggttcagtttctttatttatcattttattttgctaatttgtgcagtaaccatcgaagacttttagtgaaacgaatttggcaaattcatgaatctaaatgcaggaaaaaaaattggtattctatctaattgctttacgcatttaaattatagtaatctcaccatcgcaatgatctgatgaaatcctattgtgtacacacatttgaaattgcagcttattcccaataccaacaaggaatgacaggtaattcataccactcatttgttttctatttgattcaataaaacaaaattgaataatttagatttagtgtgaagtattttggtggttcatttctatcatttcataccttctaatactttaattctaaaaaatctttattggtacacaatggacattttccaaaatgcttgcatgccagccttcaatatgcttctacttcatgctctgctttgttccttttccaaatttaaatcttaatcatatgtatatacaattttatgttttatcttgaaaattttgatcgttttacccttaatttttgttagctttttggctctattctccggcagagcagagcatgcaatacaaaaagcagagaccatactttctacactggtttgtttatctgcccagataaa

SEQ ID NO: 14213 - DNA, 638 bp, Gossypium hirsutum
atgcgtttcatttcctcaacgatctttaccttttccactaacacaacaaaatcttgctccctctgtggagctatcaaaactcatagattatctctaagttcgtcttcaaaataaacacaacgcttatattcagttgccaccatcccacgtacatagagactaagtggcaaaaatttcgcctcatattcagccatagacttatccccttgggtcaaattcagaaacttcctcctccaggcatccacataactagcgcccacatatttcccttggagtacattcttgaaaaattcccaagtcaaccggtcaggctgagtaccctctttcactgtaagccaccaccagtaagcttcatctcgtaacaacgacactacaccttttagtttctactctagggtgcagtcaagatcatccataatcctctctgtggcctcaatccaaaatttagccacattaagggtaactctagcgataaccctaaagatctcagccccattagaccttggtcgttctatcactgacccacggcccacagcaccagtattaggcctagtgaccctttccaaaattcgtaacatagcttggaatagtgtgtcgtccccatttgcatggtcgtgtgacccaatttcagtttcagt

SEQ ID NO: 14214 - DNA, 514 bp, Gossypium hirsutum
tgttgtattccttgagaggtttatgcttttgcatggggattattattattattattaatttcacaatgttagatcccaaggtacatagggtatgaagtggttgcagcatacgatgtataccgtgcacgtgaacatcccaatgattgataatcacagccgtggatctcgcagagatttcaatccgacggttgagatataatgatttgacaggggtgataaatgtaggggaaaactcaaattttgcgtgttgaccggacagggctgtagctaatctatttctgaatctgtgactgtgttgtactcataccgcagttaatcgcattggcccaaatttaaggcacacatttaatatttttgactcttccaactttcacatttttttttcattaattccttttttgtttgtttttcaattagtttggtaaacggtcatttccttttaactcacattgcttaaacacgcatcacgttggagccaccatacacgagtttggtagctccttaacaacccttg

SEQ ID NO: 14215 - DNA, 671 bp, Gossypium hirsutum
ctttattaagcgctatattatattttacctttttattaaaaaaataatcattgtattagattaaaaagtaaaataatcatttctgttaaaattttcatttatttctatcattaaaaactaacatgactaacatgataagtaaacagtgacacgtggtgtgctacatgtaactcatggtgacgcatagaaattaattttgaatagtagaaaacgataatttttttaacaaaatgatcaatttactatttgatttaacactgaagacattaatttattcatatttttaatgaaaaaggcaaagttccctacgagacctctattatactttctccgtaaatatacatacatacatacaaattaaattataggatagatatacaataattgcatgaacatataatacattttgtgtgagcataaaaaaactcaaggatgattcacatactattatttattatttaattgaattaaaaaagaatctaaatacagattaaaaatatatgatatttactatgatgtatatgtaaatgaataaaaataattaggtaaaagtgaagtactagttaataaatattagggggactggagaaggctaaggctaaacaatgcacaattacctgagaaagctgctgcagctttatcagtgctcttaacagttctatacatctgcg

SEQ ID NO: 14216 - DNA, 607 bp, Gossypium hirsutum
  misc_feature (427)..(427): n is a, c, g, or t
atcctaatcctctaaatgcatacggtaacgtcaggatcgtcggccccacgatcgccgccgttagatgaaaccccgcatgccaccacttccctatatttatatttcatcgtaaaccagaaagaaaaagtaaaccaacgaaactaaaaatccattgctttttttttccttttgaaaagggtttggtttgggaacctttgatttcaaaacaaaaccaacccccggcccggaatccaaacctaacctccggtggggggggggggcccaattttttaaagaaaaaaaaaaaaaagggaaggtagaaaggaaggtggttgggtctttagaaattacggcgaagggaagaaaaaaaaggaaaaccaaaaccggggtttggtaccttatctaaaaaaaaaaaaaattaattaaaatacaaaacaaaaatatattnggggggtggtaaggaagttttcttacctggggattttccccaaaattgaaaaacaaaaaaaaaaacaggccccttggtttttttttccctttttgttggaagtagcccccggttccaaaaaaaggaaaaaaaattcctgccccggtttgattggttggacgaagcttggccggaacgggc

SEQ ID NO: 14217 - DNA, 674 bp, Gossypium hirsutum
aactcacatgatggtttcgcagcacagtgctcttagctgattttccgggtaattttacagtttctacacatttagctttcaatgaatgcatttctttcattccagcatcaacctaaaagatgagaaaccccataaaacatcttgataaatataaagatccatgcttttaatcatttttattttttaacctggagaagagatcactgcattcatggtgaagcaactattcgaatacagaattttgtaatattgtgacccaataatcaggatttaaaagctaatccacttacagttgcttctgctgcaaaggtttttagctcagttctgaccatctcaccatctacatttattgcaccctttgctgacactatatctccgatgcgtgttccagagctaatattcgagatcaaactatcatccaccgaagatgaggaactcatatcattggcctccttagagcctgctttatcaccaattccctctgttctacattttactgcttgtacaacttctatcatcttattttccttaacatcaatatcaacctgaaggcccacaaatttaccaaagttttaaactcacacacacatacaaaaaatttaatgttggttcaatgcattctttaattcaacattccaatctggaaacacacacacacacacacacaccacaca

SEQ ID NO: 14218 - DNA, 579 bp, Gossypium hirsutum
tgcatggagtcaccaaacaaaaacacttcttttctcataaaaattagaccatgttaaaccatatgtataacctataatcatttgcaatttaactgggctctgaggaagtaagtgatcaaacctttagaagtaatgaaccaaaagtttccatcaaacatctttgttacctcaaattaacaaaaccaaacacccttgaaaggaaccatcatgctgctctttatttactagagctctagaaaatctattggtccaccgaatctttgatacttgaagaatcatctcatattcatttcaatcacagtttccaggagtttccctcagtaaggggtgcctatagtggcaccacctctaatccttcattcagtttaactagtatctcagataaaattctgagatggttcaaaccaatccaactacctaggaacaaagtaaagcttcacccaggaaacaaggtcaagataagtagaaggctgcaacgtttgttctccagtcaggcaaaggataaaaagggaagcataatgcttaaagtttcgtaatagcttcctctaagaccgtcgctgacataatgtggtgaacaaa

SEQ ID NO: 14219 - DNA, 624 bp, Gossypium hirsutum
gtggtaagacacattacacatctaaggataaaatttaaattcgaacgatgatattattgggaggtattgccataaatcccgaaaaaattaatctccatagactgtaaagttgacatgaaagatacattggttataccaataaaaaaaggatggcgtgaaaattcttttaaagtaaaattaaagtatctgggtgacatataaatttatcattgattgaatggttaactgtactttcatatgagcttgagtaagtaattaaacaatagtaaaaaattgacaacaaataacagtgctatcaatttggacctactaatgaccatataaaagcggagagatgaaattatgtcaaattaaagaaattaaatctccaattttaatattataaaataactaaaaccgaaattagagcgtcgaaaataatgggcagatctaatatcaaagagagagcagtgccgtacaaccgaaaccttgctagcttctgcttcaaccatagcctcaagtgcttcaaggttttgtttctatctatgtgatcaattggcaaatcgaaattaatgttgaattgggacataacatgaaccataaagtgggtggtagtaattttaaccttctttagcatggcttgcc

SEQ ID NO: 14220 - DNA, 651 bp, Gossypium hirsutum
ccggttgtcaagtatgaatgtaggcatatgaacaccccttttttaggagcctcatggtttacaaagaagattaactttattaatacattaacaaatgaggttattcttttcttttcttttcccttactaaatgaaaaactggctgggagtctgggatgcagtaaggattcaggaaaagaaaatgaacaataagaagtactgaaaaagaactggtgcttattggcgtatgcatgtgatgttagttggaacttgtggaaattacccacattggttgtaagatattgttgttagtaacaaggttgttggtatttccttgtatcttgttcaaaatcaaaatcttacttgctatacttgcatggaatagtaagccatttagttacaagatgaggatcttccatcttccagcctcctgtataccaaaatgggcagacaaaagaggtagacttttgtgtattccaaggtgcactataggtgcatattctttcttgttgtagagtttcatctcaaaatttatacagattttatggaacacattcctatcattttctctgaatttattccacttcttgacaataattgatgcacttcatatagcttcatcagtcaataataacagataagggagctacaaggttctggtcctggatacca

SEQ ID NO: 14221 - DNA, 427 bp, Gossypium hirsutum
catgagccttatccaaagagagttagaataaaagatttcaaagaaaaaccccaagagatgaagttgaggtaggaacatttgtacaaaacacaacttcaacctaatgattagtctcatgctaaactaatttttttttagtcaacttaatcctttagttgatctgcatcaaatacaagcaaatccaggaagatagaatcgaaacaacataagaaatatttaattgaacagaaaaaccaaaagaaagatctattagaaaaataataaagggataaaggtgttgaatgaagcattcatggacaaaaagagtgaactaaaacccaagaccagcaattacatatatgttgacacgcatgtacgacgaaaacattgtaaaacttgaacaaaataaaaactataatcatacttgtgccagacaagtatctgtatc

SEQ ID NO: 14222 - DNA, 618 bp, Gossypium hirsutum
  misc_feature (446)..(448): n is a, c, g, or t
  misc_feature (484)..(484): n is a, c, g, or t
  misc_feature (496)..(498): n is a, c, g, or t
  misc_feature (537)..(537): n is a, c, g, or t
  misc_feature (551)..(552): n is a, c, g, or t
  misc_feature (560)..(562): n is a, c, g, or t
  misc_feature (583)..(584): n is a, c, g, or t
  misc_feature (586)..(586): n is a, c, g, or t
  misc_feature (588)..(588): n is a, c, g, or t
  misc_feature (596)..(598): n is a, c, g, or t
tccccaatctgaagccagagtagttatatcaaatcccatatctgccctaccagaggtttttttttcccctaataattttaaagacaagtgttaagtatccagcctcataccagttagcaataggtgcagggccaaatccacataatactccccaccaaatgtagctcacagggcctacacgtaaacaaccttgctaggggtcatcaacctcacatggggttatgcaaaatcgacaacatgactaaatttgggccctaataccatattaagcatccactctaaaaccaattggcaatgcataaaagctatgctacttaaactcgggtcagggttaggtacgggtatgtatccaacaggggggtttaggcttgtctaaggctttccatgcatttaaaggatccttaaaggttatattcccatatctatatgttaaatacaactacttnnnaaaaaatgaaaaggttgaaaaaaggggctcaacttnaatataaaaatnnnaaaaatccaatatttaacaagtatggaataacaccggtnaacgacaaaaaaannaggatttnnngttccttttcttttattcctnntnanttcatttnnnctttttttttgggggggggg

SEQ ID NO: 14223 - DNA, 185 bp, Gossypium hirsutum
  misc_feature (64)..(65): n is a, c, g, or t
atccctgcttgaaccgaatatgaaggcataattaacccgataccgcctccataagtatacattnngcagcatacataagcatgtgtagaacaatgaatccaaataaactgcacgaattttgtaaaagcttgtcaaacaaatggatttaaataccaaattaactcgaattgcatggaggcagcttc

SEQ ID NO: 14224 - DNA, 742 bp, Gossypium hirsutum
  misc_feature (673)..(674): n is a, c, g, or t
  misc_feature (711)..(715): n is a, c, g, or t
  misc_feature (719)..(719): n is a, c, g, or t
  misc_feature (721)..(721): n is a, c, g, or t
  misc_feature (735)..(738): n is a, c, g, or t
tgcatctacgtggactgagtggttaactattatagtgcatcgataaaaatgtattaatataaagaataagaaggtatgaaatcacttgctcgcagagtaaggaacttctgccaaaagcgaaagaatttgtgatccacttaaacaaatgaagtagatcggccaatagccgttagatccgcttcctttaatgcccactgatccgcctgaaggaagccttttgaggaagttgtttagccttatagctgccttaaggcagtcggtttaaggcggaggtagtgagttcataagtaagcatgaagcttgcctgacttgacaggcgaatggaaagaataacatgcgcttaagttaaggaaaagccttactctaacaagcaagaaagagcttcactcagcaagaaaaggcgccctagaagctgacgcgtcagtccgctcttattgcccttatgtgacttgaacaggcgttcggaggttcagtcaagcatagcatagtgcggcttatggttctagtagcataaaaaagataaactttactagaagacctagtctgattatagtaagtagtatagattagttagattcgtcgaacagaagaagagcttttacttattaattctattatattagtaaagcgttagcacctctatagagcaagggtctgcgtagacatttttttnnctttttttcccctccttttttttttttcttccttttnnnnnttcntntttttccccccccnnnncccc

SEQ ID NO: 14225 - DNA, 687 bp, Gossypium hirsutum
tgggaataggatgcacactaactgattttgcattctggcttgaagtttcaagggcatttccattaccaaaaaatctatgaagtggagtcaaaacagaattcttccctacaaaaggtcactaaatttggtgaatgaaattattcaatcataatttagaacttgattacaattcaatcatagctaaacaaaaaggccgattgaagggcacactttatgtaacacaatatagtaattttcctactcattgctatcaatggatataattagttatacacgataaagtacgtatcaactaaagtttaccagagcagagtcccaaaagcttgcgtctgcgtaagctcaccatgttggcaaccttttactcagtgaacgatggcttaattgatcgtcctttgcatctatccttgtgcctgtggccttataagtggattaaacaattagaaaatgatgagcattaaagaagaaagaacctgttagaaaataaacaagatgacaggtaaaaacagaaggctataggaaacagcttcgtaagataagtggatctaagatatcacctattgtagtcacttatatagcaaaataagaaaaaaaggtcaagagatgcaaggaacgccatcagaactatgagtcaaagcaagtaatctgataatgaacctaagcaaaatagaagtgcctggtgaaactcca

SEQ ID NO: 14226 - DNA, 649 bp, Gossypium hirsutum
tagcagaaagttctcacaacagccttgtaattattacagtgagatgtattataaaacatactgagatgtatagcttagtagacaattttatgtatttccaatcaatttaagcttcaaggttattgctaaactgacattaaaacggagccaagtcactgtattaacaactagataactttttaacaaaataatcatcaaactaatacatggcaaattaggttattggcaccctaccttcatagttactttgctagggtatatgccccgaaacatctatagaacaaaacatcatttcctcacttatcaaattaatagcagaaaattgagcaaacactcatacaacatttagaaaacagatgcagaaaacataaaagcttttatactcccaacaatgcaacaaacaggaaacaaccataaagaataaactttttcatggaagaaaaggtatggagccacaatgtagatgtacctcatcaacgcataaaagagatggctcttttgctagctccaagacaccttttatcaaagatcttaaacccttctctggagatattagatagggttgataaccatctgcttctaggacaatctgacagaagtatcaatatgacattaaaagaaacccaaccggtacatagcagtttacaaa

SEQ ID NO: 14227 - DNA, 698 bp, Gossypium hirsutum
  misc_feature (634)..(636): n is a, c, g, or t
  misc_feature (638)..(695): n is a, c, g, or t
ctaccacaaaaaattacaaattcgttggaaaatgtaggtaaaactgtaagaaaggtcctttactatgtattcaatccatcttatatttagggctagtttaacattgcgacaaaaaatgcttttaagataaaaacattatttgttaacaatatactcttgactttcctaaaagtatttttagataaaaaaaagcaaaaaaatttaaacttttgctcaaaagtggttgagtttgaatggccattagttataaaaattttgttctaactgtaaaaagacataattagaagaaaaaaaaattaaaaagatgaaaccataatagataaattaaatctactaaaaacgaatggtacaaaaattatatatagaatttgactgaaaattcaagtccgtgaaagatcgatggtacagaggagattaaaatttttttatcggtacgtaacagttatttagttgcacgaatactctaatctgaaagtgacagcaaaatccattcaagcatgaaatgaaagagaaccaacggtgatttgtagcattttcaaatttcaaacgtgtatgtcaataaaattttgaataatcattagagattacgtaattacaggtttccattctactaccctccgattcccgttaatcnnnannnnnnnnnnnnnnnnnnnnnnnnnnnnnnnnnnnnnnnnnnnnnnnnnnnnnnnnnnttt

SEQ ID NO: 14228 - DNA, 648 bp, Gossypium hirsutum
accgcctttggaagtactaacgtccagagtgtgaatactgcaataaaagacaaataaatgaggcaatatccacaaatatacaggttcaattgtaatatagttacaatggagtaagtgagtactccgaggatcatacccaagggaggctagtgctagatcaattttaacctaaacaccaaaagatctaattagtacttgaaataggttatattacgctaatataaataaaaggattttttaagatttttatattgataaaatataataaagaaagaaataactatcaagagattggaaagaagaattgatcaaatccggttatgggtgattagctcgctttggtaatcttcatcaactattgcttcgggttcctcatcaatcaactagtcactatcccaataggatcttctgatcttccactaaaataatgagtcggcaatgactacttctctttcaacctcacagtccaaacctgcttggggtgaaggtgttcacggataagccataccaaatttgggttaattctcaccttaatgacttattagggtttttaggcctagggtttaggttcttcctctcccaaatagctgatctgttgagtaaccctacaaaacagttaatagatcatacctccactcactaattccc

SEQ ID NO: 14229 - DNA, 550 bp, Gossypium hirsutum
ctgagattcattctgaagtgtgattattttagtgcaaaatattattctctacgtttgacttgagtttggctaaaactaccatactccataaattattgcagacgtttttatattaataaacgaattataatttaatatttttattaaaaaataagtaaattagttattatgttttgaaataaaaaaagtaaatcgatcattttattaaaaaattatctatttttaatattaaaaattaattcatatacatcaaaataaaatgcatatgccacaccacgtgtaattatttaattattttattaactaccttaacttttaatgattaaaaaaaattaacaaaaatatcaattttatccaatattttacgggatatggaatcctcagcaaataaataaaattcctaaattccataatacctaaattactctcatataagtttacaaattaccaaccgttggtcggttcgttactctgcttttcagaagcgtaaagtgttagttgcgtgtaaatctcgagcgccaaaaatcaacggtcaagatttcatcaacac

SEQ ID NO: 14230 - DNA, 688 bp, Gossypium hirsutum
catgtgctgatatcttggctctttctgctagagactctgttacaattgtaagctcctaaattcctgtttgcctgatgagtttcatagagaggtgaaagtgatactttcatattactgaacaaatgagactcttggtgaaacttgaacttgcagtacatcttaaattttaaattaagcaagtaattgagagattacccttttgtttttgttgttgttggtaagcttggaggcccttattgggatgtgaaactggggagaagagatgctaggactgcaagccaagctgctgctaataacaatattccttctccatcttctaacttgaatcaactcatttccagattcagtgctcatggactttccccccgggacttggtcgctttatccggttcgttaagcattcaacttaaaacaaatttataatacaaataagaaatttggctcaggattttatctaccgattctatcgaaacctcttgctggttcatagagtgggagcaccgtagagtttttgaacaaacagaaccatgcatggacaaagcctggaattttgtcaggaatgcgaaatgaaatatattattatgaatgctaaaatgcaatttcaacattaacttatattttctagtttttaaaaggattgaatcgggaaaattttctattttggggtgatgagaagcatagcacttaa

SEQ ID NO: 14231 - DNA, 609 bp, Gossypium hirsutum
taatatataataaataatgaaatgtatggttttaaacgtactgattataagttatacaacatgtatgatattaaaataaaaaatatattatattgtgagtaaaaccaaatttaaacacataaatacatcatattaataatattaaatgcactataattatttatcatggaggtaataaagtgtgcataattaaatggaaatgcataaaaatatattaaattaaaactttgattgattagtaaaattaaaattttattgattcaaatgtcacaagtctaaatctcacaacatgtaaattatatattggttttttaagaaaaaaaaagaaatattttttaaattttttatcctattgattcgtgaaatttaaataataatgtagaaatatagataaataaaaaaataattccacaattgactgagaatgatatcaaaattccaaagttatcgtgctcaataattcaaacttaaagcaatagcaacaactatatgaaagaagagaaaaattgacatggttggttgaattaagttgcattaatcaattgtactaattgaaattgaaaatgaattgaagtattaatttaaaaggagggccttataatccacaaa

SEQ ID NO: 14232 - DNA, 694 bp, Gossypium hirsutum
ctacttgagcatagggagacctcgagctatgacacactacaagtgttaaacatagattaggagaagacctagatgacaccaataattcgcaccctccaagacgaactagacaaccgagataagaagtagctcacaaaactacaacgtaaagcagtgagatatgtcgtcattacaaattacaaatatttaccgaattcccaatatatgattcaaatatttgaatgtcacgaactcatctgactacacaatgaattaagacaacatattttattctacatttgataggtacacccttttggagggtatactatataaaaagagattttcacacccgctgttgtgatgcctatcactacttgaggctgaatatgttatataagaaattcacgaagggatttgtggtgatcacctaaggggtagattactcatacaaaaaatctttatacaagggtatactggcctacaaaccagaacaacgcacactagttggttcgcatgtgcaactcctgcaaaataaatgccaaaatccatcgacaaccagtagagcctcttcaagtcatgtcaggttcttggtcattcacagcttgggggtttgatatccttgacccatttcctataaccacgacacaaaagaggtttatattagtgactatagactactttaccaaatggattgaagctgaaactttagcga

SEQ ID NO: 14233 - DNA, 650 bp, Gossypium hirsutum
atcgaaacataaatatttcgttcaaacagtagttaccttcgattgtgcattataaggcagagttttgttcacccaagtatcatgcacccaatcaagtataacgaacaccctcctaactgtatatagcaatggcaccaatgctctcaccggcggcgaaaacaatgacagcccacttattactttctccgttagtatctgaaacgaaagcaagaacaagtgaggtgttgctgaccgaacggcctggtcgtccgcccttgcaaatccacccaacacatacgctagtggcaagagaagacctattgtggttcccagaatcacatacagattaaacagtctgctgcctcggaaaatctcttccgagccaccggaggatactcgactgccacgggacgggaaggcgaagcgtgaaagggcgatgaggtaagcggaggtgaaagccgggaagactaaatccagaagtggcactagaccactgatagagaaaaccataatgaaagctactagttggagttcgatgagacgcaatgatcccattacaccgcccaccactggttgttgctcctggtagcgaatatgttggtgttcagattttccgccgggtgctacggtgtggtctggctcactcctaggagccactgcaagtgatacac

SEQ ID NO: 14234 - DNA, 688 bp, Gossypium hirsutum
ttggtcattgaggtgactatctctcttatcttagtattacagcatttccacacatcaaaaagctacaatgccacctcagaaagcttcaaatccacatcctcttacattcagatcaagagaaaaagaggcaacccatgatgtcattaggatctactctcattttaaacggatatctccactaatcagcctttattagtttatgctctctacctttattcttctttgatgagcaataggtgactcatgcaagcaaaaaggttagattcaaccaccataactatatccctttaaataccatttcccaattccaaagattcattcctcaaccatcaccaaaaataacttctcttcctttgatcatctttccatttcattcataaaaaaatgaagaaccaaatactcgaacaagtcattggagttccaatgaaatcaacactgtatcgagttgagcgaacgccgagacgatacttaccggattctgctggtcagtatcggattccatcatctgttgaagggtctaacacatttagaaaaggtaggtggctacattttaatctgttgtgtctagaaattcataatgaagatgtgtttttagtactaatgacaaagcattggaaattgcaggcaaaagaaactttgtacttaaaaggataaacaatattgggaagaaagctgatactttcgcaca

SEQ ID NO: 14235 - DNA, 563 bp, Gossypium hirsutum
aacaagacgtgattgaaacaccagctttgagatcgagatacaaaatatattggaatatttgacaatttacttacagttttgagtttagaaatgccttcggaatctggatttcggttaccgaatatgtcaatcacctctcttctagctttatcctgccaatctccgtgagttgctaaaagcaagactatccaagcaagtaaggaattaacagtttcttgcccggcaaagtagaatgttttgcactcatctaccaaatcttccattgaaagcctgttattttcgtccgaatcatgatatgcatttacaagtaatcctaaaaaatcattgccaaagctgtcagcttctccattcacaaatttgtcttctcttttcttaacaattttcatcacacaatcttgtattccttttgcaagttcttctgacttcagcatatcaacgcctttccataacttgctgtaaaagcaaactaatgtcaaccatatataaggagaaaactaaatccataggaataaacattctaaaatttgttgttgggaactcgatgagcccaacacactcactat

SEQ ID NO: 14236 - DNA, 638 bp, Gossypium hirsutum
gaaatgggatgggggagcctatgaaatgtggtccttgtgcatttttatataaatttaaggacatgaattgcaatattactttctaagtttaatccatcaaattgaaagtatatttacaaaattttcataaaagtaccatacctgcccctgtactatactccaaatagcattttggcccctctaataaaaaaatgagcaaacagatctctatacattagataatggggaaatagcccttttgttaaaattatgtcattaaatacttattttggccttatatatatataaaataataataaatttagtctttaatctttataattctatttaatttgactcctattcttttatttaaagaaaactgacctattaaccttttattgctatttgctaacgtgacacagtttttgttttcggctattttagcaaataatttaaaaattatataaaattcaaaattcaaaaatcacaaatacaaatcattcaaaaacaggaatgaaggcaaagggacaagcaatgccccccaaccaatgatagatttttgccttttaattttttatgaaattatatattaatataatgataaaattataattttgaccctctcaagcaattttctagcttccttccttggatca

SEQ ID NO: 14237 - DNA, 687 bp, Gossypium hirsutum
tatcgaagacaaagactggcccctccccctcaccctcactcagaatattaaagtaaaaatattttgaactttaggctcttaccttaatttcctattaatccaatagaaattctatacactttaacatcaacatgaaattcaagttatttttattttaatattaaaatcaatggattctgtcgagctaacactcgcttgacatattaaatatattttaattgctacttatattgtctttgatctattttagtagtgtccataaaactagaggtgagtaaaatttgattcgattcgaaaaatttgataaaaaaattaaattttgaattaaatagttcgagttaatcgagttatttggatcaacttgaatatgaattacaaaatttgtgttatccgaaaatctgaataagaaaagacaaaactacgtcgttttgatacatgtttacccattaagaaccattatattgtttacgtagttaaataatcttatacttcgtctactacttaaataatcggttcatgtaaatgtaacattgagtataaataataggatttgttaactcgactaaacttgatccgaattttttttacttgattcgattcgattggaaaaaatttcaaattgaattcaggattcataaacttgactaactcgaattttttttactcgattgaattctcacacctaca

SEQ ID NO: 14238 - DNA, 660 bp, Gossypium hirsutum
gaacattgctatctccgctgtaaacagggaaacaacaatcacaatcaagaagaaatggtatgaatacattatgaaaggtcaatgaatgatatttcttgtcctcccaagcaaaaccaataaaacaaaatgcaaaaaacaatatcttcaatatctttcaaagccagaaaagacttcatttatcttcaactttatttgtttcccttagattaagaatgtatgatcacaaatcaaaattaaaagcgaaacgagagataggtgtgcgttatagttgttaacttgttacacttgaacaacatgattatttctgtaggtggagtggcaaagtacttgtatttgaatcttcatttgacacccgtcccggttcggtccagtggataaccctccccccaacctcattaaacacataatctatacacaaaagaaacagggcacaaagagaaagagaggtgtgaatggacaaaaaggaatacaaattgtttaccttcagttcgagcattggtcttttgagtctttgtaaataaagacttctcaaaggcttccttagcactgttattgggccactcatcggagtaatatttaacagcaacacgattcccctcggaatccaggagaaggatattttttatagaaggacaagactcctagcaccaccatcataaa

SEQ ID NO: 14239 - DNA, 564 bp, Gossypium hirsutum
ttgcatgatgtggcctgtttattacatgtttatatgctattcaagaagttccgaacacacaaactgctatactttccctaaaagcaatgccgcagattgaagtaggaaatctttatcagtgctaaaaggactacttcgatacttacattggcttgcatttgggaaccttgcaaaatatagtagaaagccttgagagtctaggctttcggtttagtggattaaacaaaggattaatataatatttggccctgaacttggcaatgagtacctaaaacttttttggtccacacttgtcttgcaacttgatagctttttcccaatttaattcctgaacttggattctgttaaggtgtcatgacgtagcacaatctcagtgtcaatcactaacgaaatccaagttcagggtcaaattgggaaagttgcttagtttctggattaatgtggatcaaaagaaagttcagtatcaaagtggacctcgttgccaagttcaaaggtcaacaattacattaaccctaaaagaaagacaaaattacgactagatcggatttagaacaaggtgtcact

SEQ ID NO: 14240 - DNA, 584 bp, Gossypium hirsutum
  misc_feature (34)..(35): n is a, c, g, or t
attatcaatttttaatttgattggtttaatcctnnattcagttttaattaaatagattataaaaaaaatcatagaatcataaaattcaattcaaccataaacttgatcaaaattttatcctaatttaatcgattcaaagagttcgtagtttaactgatttaatctttttgtttgaactaatcggtcaattaatttgatataccaatccgatttccaatgtttgtgggatccaatgctaagttaagtaacatcttaatggaaaaaaccagtaatgggaaagtttattcctatttagtgaggatatacagataagaacctttgaccatgtacttgataaaattgttatttaacttccccaaaaaaatataattcatatcttgatttttttaaggttttaatttaaaaattaaaatctaacttaaatcaaaatttaatgtgacatagagaatataaaaaataatcataatgtgagctgaaacagtaacattcgtatctattacaattgcaatggctaagaaattccactttgaggcaaaggtaaagaaaaagaaaggatgggaaatgcactttgagataacagacgg

SEQ ID NO: 14241 - DNA, 692 bp, Gossypium hirsutum
cgagaaagaaggatgtagtttgggttgtagttgataaattgatgaaatcagctcattccgtttcgattcgaatagattaatcacttgataagttagttgaattatacatttctgaaattgtgagattgcacggggtgccattgtctattgtgtcagataaagatccgagattcacttcgaggttttggaagaaactgcaagatgctttaggtaccaaattgtattttagtactacttttcacccgtagacggatggccaacccgagtggattatttaaattctcgaggatatcttgaaatgatgcattcttgagtttgaaggtatgtgggaacagtatttgccagtaattgaattcacttataataatagttttcaatcaagcattaaaatggcaccgtacgaagccttatatggtagaaaatgtcgtacacctttgtattggactgagctcagtgagaataagattcacgaggtcaatttgattaaagaaactgagcagacagtaaaagcgattcatgaaagtttaaaagtagcgtcaaatcgtcagaaatcgtatgcagacttgaaacgaaaagatattgagtttcagatcggtgatagagtgtttttgaaagtgtctccatggaagaaaatacttcaatttggccgtaaaggcaagttaagtccgagattcatcgggtcgtatgagatt

SEQ ID NO: 14242 - DNA, 690 bp, Gossypium hirsutum
agcagtcagttcattcctacaaattcggtaaaccattcgttcatcatcttgaagaaggcttccatagcatctccttcccgacctcagatgcggaccttgtaccactcgacgctactccgtgaacagaggcttgtgtgttactttcaactttatcgaagtcagctcagttggaagtcattactatatgaaaacatatttcaaaatgagtcaggagttatcatactgtcacaggttatataattatatgtatttctagactcacacacgctacattcaatccgagaatcaattcaaccatagcttcgataccactaaatgtaacacccctatcccgaatccttcgtcggaataaggttacggagcgttaccagaatttttaaattcaaaacattcaattttcaaacatatcataaaacatggcaatatcaatcaaaatcatacattttgtcccttatacgagccctcaaggccctaaaaacactttagaaatgaattgggactaaatcggaaacctatagaatttttgggaaaaagttaaaattttcatactgtagaggtcacacagccagtagccaggccgtgtgactcacatggctgagaaacacacccgtgtctcaggccatgtggacattcaaagtagggacacacgaccgtgtcccagcctgtgtctgtgccagtgtaaactctctg

SEQ ID NO: 14243 - DNA, 664 bp, Gossypium hirsutum
ttttttaatatttaatatttaaaattataaatttctattttttaatttaaatttaatatttttatttaactaaacttaattgtcacgttacattttttttattagccaaaacatgtcatatgatgctttttcattagccaaaccaaagttgtctaaaggtttttttttaatcctgattacaaaatggaccaaatgttttttatttaaattttatatcttaaatagcatttttttatatattttaaaatttggttatatgcatcatttattgttttttaactttttacacattaactaaagaagattgacagtttgtgtcgtggaactaaaaaaactatgttgcattgagatattatacagaatatacatttaaaatgtgtatgtgttataatttaattattttattgcaaaattactcaaagttgttacatattatcgaatttatttgaatgaaaaataatactaacaaaaaaacatggaatcaaaattatatagtaataataagtaaaatccagcttagggagcttcgcgtggaattttccataaaacagactcgcagttaaaaggaaaacacacacacacacacacacacaacaaaagggaacaaaaatagaatcaaaccccaaaggccatctctcgtagttgcagtactcctttgggctac

SEQ ID NO: 14244 - DNA, 605 bp, Gossypium hirsutum
  misc_feature (59)..(61): n is a, c, g, or t
ggactggaattcagggcgaagcactgaaggacgttattctgataataattggataaatnnnggggaaaattagattcacaataaattccttttcagaaaagttacaaagaggggttgaatctggttctgaaaggtttaaagggattagaagatcatttaaatcttgttcttttaaccgtgggtttgggtctagtaagaaagttcttgatccacaggggccgtttcttcaaaggtggaacaagatatttttattatcttgtatcatagcagtctcaattgatcctttattcttttatgtcccagtgataaatgatgataagaagtgccttgttttggatgaaaagatggagatcacagccggtgtgctgcgctcattcacagatatcttttatataatccatattatttttcaatttcgtactgggttcattgcgccttcttctcgtgtatttggaagaggcgttttagttgaagattcattggcaatagcaaagaggtatctgaaatcatactttgtaatcgatgttctagcagttcttccccttccacaggtaagaaaacattacaggcacatgaaaatgttcttccttctgggtttaactgcg

SEQ ID NO: 14245 - DNA, 651 bp, Gossypium hirsutum
tttttgttttaccaaaaggggataattttacaataagtcctttaaatatagcagagattttaaattagtcccatataggcaaagttttttaaacctgattaagaatagaccgaggtattggtctggagagaggggttagacttgttgactcgcgaaccgcttggaatcagttatattgagataaaaaattggttggatcgattgaattcgttttttctatttttaattttttataaatttttactaatatatttaatcaagctaggcgaactgatcgaattgggaactgatggtttaatcggttcaaccaccagtccaattctaaaatccttgaaataggttcgtcgatcagcttaattattagcttcgttgttaaatgtcgtgtcaaataggatatagaatatatttaaaacacgtggaagaaatctgtaaggtgcaatctgtaaggtgcgatagttttcataattttttgttaagggattttcgactctttcagaaagtctatgaattgttgtttgtttgtacccttttacaagttcagtattgtctcttgaatgagttttgtcttccaactctatcaaatgcctagggcacatggtttgcttattcaagcatctaatgaagcattcccgctttgtgaactaattacct

SEQ ID NO: 14246 - DNA, 653 bp, Gossypium hirsutum
taggatactataaaataaagattaaagatatcagtgtacctaagatagctttctggtcaaggtacaatcattattagtttcttgtaacatcatttaggctaatgaatgcaccagttatgtttatagacctgatgaatagaggttttcaaccttactttgatcaattcctagtggtctttattgatgacatattggtttattccaagagtgagattgatcatgaaaagcatttgagaatcatattgaagactttacgagagcatcaattgtacgcaaagtttattaaatgtgaattatgactgaaggaattacacttttttggacatgtgatatcagcggacagaattaagatggactttgcaaaggtaaagaaagtgcttaaatggaactcacccaagaatgttaccaaagtccatagcttcctaggattggctggatactattgaatgttcataaagggattctcaataatagcatcgcctcttaccaagctactgaaaaagaaataaaagtttttttggactaatgatttccagcaatgtcttgagaaattaaaggcagtcataaccgaagctccattgttggcataacctgagcctggagttgaatatactatctatatgcatacgtcactgaatggattgggttgtgta

SEQ ID NO: 14247 - DNA, 609 bp, Gossypium hirsutum
aaaatctatatatacacacataattggcttgtattagctaaaaaatacttagagaattttaccattgtcactttaggagctattttttgagtgcaaaaatggtaaataagaaaatacgcacatgtgagtcacttaatttacacctaaatttttacggggaagctttaaaggagggggatccaatttagaatataggtgttgcatggcaagtttgtaaaacttaaattatcgtttgtatttaattgaagtggattaactctttaaataaagtctcataaatgtaagaagaatccgaactacgtaactaaattttttttatctatttctacttttatctttacttgtaacttaatccaagtacaacatattatatatatatcataagagtcaaagtttggtaaataatacacctttgcttatcaacaaataataaagggtccaaactactaggagtattataaattaacattaaacaaagtggaaaagtaaaagccatccgagggagtaggaggttgaaaatgattccctagctgaacaagtgcattagcacatttgtaacttattttaatctagttctcactttgatcctctttactgcacacgttgaaa

SEQ ID NO: 14248 - DNA, 539 bp, Gossypium hirsutum
tattttctgaaaaaattctttagtccattcagtttggttgtctcggtctcggtctctccctctcctgatgaacacgacttggattcgtccccaataggtaatgtccttcccctttcctcaatgcttttttagcaagaaaatgagcatactcgttatctactttaggaatgaaatgaaacccgatttactggaaatatgcttttttgctttggatgtgtctgatggtcgcccctataatcgatttatcgtgatctatattttttcattttgttatcattgttctcgattcccccattatttccagagtgttaaaacccattgtaatacctaactgaatagcttataatcctgcatgtgcctccgccgcaaatggagatggtattttggaatgaataaccatcttcaaagccacgatctccccccactcgcatactaccagacccaaagcaaatttggaggatctcctgttgaatactgcatcaaagtagacttttgctctcatacttctttctatcggtttgtggcctctgtcgatattt

SEQ ID NO: 14249 - DNA, 610 bp, Gossypium hirsutum
tagcacccataaaattctttttatttctttttatggtgtattcttatatttttatgggtattttcaactagtaataggatgttgaagtttaagtcaactagttacgggcatgtacttcgagaagttttaggctctctgtttttcaatgataaccacacatttaaaaaaaaatccttcttttttccactagtcattcttttgttggtattcaattattaatggttaaattgtcggatgggtccttataaaataatttgaagcataaattagtctctttattatagaagtatgcagtttaactcatatacaattttttttatacaaattcctatacatttaattttgaagtaaaggggttgattgaacttcaacttagttggtactattgctatggcagcaacaagaagggcatgagttcgagtacgcttaagtgtattttccttccaatttaagggaaaaaaaattgaaaggaataaaactttaaatagtggtaagctttgacgttaaacagtgcaaacatttgataacattagggattagagtgggccaaaaatctttaaggactaaagtgagaaaaatgatatactttagggactaaagtgtgcattga

SEQ ID NO: 14250 - DNA, 654 bp, Gossypium hirsutum
  misc_feature (343)..(343): n is a, c, g, or t
  misc_feature (533)..(535): n is a, c, g, or t
  misc_feature (546)..(547): n is a, c, g, or t
  misc_feature (553)..(554): n is a, c, g, or t
  misc_feature (556)..(557): n is a, c, g, or t
  misc_feature (571)..(573): n is a, c, g, or t
  misc_feature (575)..(576): n is a, c, g, or t
  misc_feature (578)..(578): n is a, c, g, or t
  misc_feature (580)..(580): n is a, c, g, or t
  misc_feature (593)..(594): n is a, c, g, or t
  misc_feature (596)..(603): n is a, c, g, or t
  misc_feature (606)..(611): n is a, c, g, or t
  misc_feature (613)..(615): n is a, c, g, or t
  misc_feature (618)..(625): n is a, c, g, or t
  misc_feature (632)..(634): n is a, c, g, or t
  misc_feature (636)..(647): n is a, c, g, or t
  misc_feature (649)..(651): n is a, c, g, or t
taatctcgactttctcttcggccttatacctgtcttcaagcttcacgagtaatcgacgtttctcagatatcactcttctgcccccgattgaactttgttcttactttgagactcttgtgcttatcaaattttcatccaggtaatgcttaacatttcttttgtttagagtatgtcatttcaccatttatcatgtaaataaacacataatgagatgcatgaaaaaggtcagaaaaggaaaaaaatgatatttcatattcctctatttcaaatggggaaaacaaaacaagttaaccaatgagagtaaaaaatgaaaaaaaaaaaaaaagaatcgtattcaacgganacaaatgctctaaatattcaacacatgaactcttcctcgttcctcaatcaaaaatcttttcgagcgcggcttcttgattaaaagatttcaaacttgcaaaaaagattcaaatactgtagcctcactgcttgacctatcgttcgaccgccaggtttgtttcattaggacgccctctcggcttttcatcctnnnctttttgaacnnatcaanncnnccttttcgggtttnnncnntnanctttttttttttnntnnnnnnnnttnnnnnntnnnttnnnnnnnnaattttnnncnnnnnnnnnnnnannnaaa

SEQ ID NO: 14251 - DNA, 602 bp, Gossypium hirsutum
cttcctccaaagcagcctattctaggagtgctaaaagtaaagcatactaaagtattattccctaagcccattagagtattcccccatcagtgcttatctcttttctttttcactcacaatcgggagaagcctactataaatctgccataatcaactccttgctagtcagatatggggattagcatggggaaaaaaagcccttatttattacctcctattgacctccttcgaaaagaactgtaaatatgcggaaataggatattgcactggaaatctcctaatacaaaaggaaatatgaacttccaatgacgctgacaaggggctttctcgaccacagcatacggtgacgatgaaagagatacttatatatagtacggaaatctagtccctcttccgttgttgagctttctcctccctcgaatactttttaaacttagggagacgatgaaagaataatagcccataatcttatctttcccttgtctgatctcactggctaagtctctttccttgtaatacgaataagtccgtccatatcaaagtaagtacagtcacttcattcctctattatattgttcgagtcatttcatccatctccttaa

SEQ ID NO: 14252 - DNA, 684 bp, Gossypium hirsutum
ctgataggagctttgtaacaatgttgttaacctacctcacaacctatggttcgactttatgccattccagcattaattagaactattgtcgaactcagagtacctttattgatgtcgacaaaatgggtatataactctatataattgatccactaaagcaatatgaatcaagcattgccttgacctctatgtcgattctgagctcaaatatatcatatctatatttcaagctcaaaattcttctttggcctaaagtcgacactttcctcttactttttgaccaaagctcatgcaattttatgctccgatgaaagcaaattttgtagattgggctaatataaaaatgaccccaatttcgatgtcacaaatttgactgtcataataaataacggctttaatccgtctactcatcttcaactaaataacatgtttcacatgtttaaaacaaaacattatgtagaaaaaaagagtatgaattatccaaaaaaattaacaacgaaacttacttaaacgaatttactttgttgattcgattttttaaattcaggtctttaacataaacaatcttctccttatgcaaatctccttatgaaatgatttgcttgaaattttagtatggaagttctccaatagaatggtggctcaaaattttagtatggaagttctccaatagaatggtggctc

SEQ ID NO: 14253 - DNA, 617 bp, Gossypium hirsutum
tttatttttaaagggttttcgcttttttttaaattgtccactcaatccctctgtttctgtattcattaaaattttgaaattttactttttaaattatttaattaacactttaatttttattttgattcgttaaagttcattttccctcttaagagtgctattattatttctttgacttttgtggtaattgattaatttacatgaaatgggttagatagatacaacatgcttaaaggtttacttttgtgcatgagttggtaattaatgactaggttaaatgagttttaacttttttctatgctaatccatgttacttttattaattggcatgtaaagtgattttttttttctaatatgaaagaaggcaacaaacgacctttagatcaaataactctttcatgtgatgcccaagtttatcttctaacaacaatttcctaacaagaaaattaggaaactaaaaaataataagtccaatatcatcaatcgagcctgaattagcaaaccaatttgctaccatattactctctctcggaacaaattagaatttaacttcttataactgtatactaacctcattaatccttcatacaagggccattgaaaaagtatccacaaaa

SEQ ID NO: 14254 - DNA, 645 bp, Gossypium hirsutum
gtttcccaattcagtttcctaataaccgtcaacgcatctcccttaacctgtatttcatgaaaacctttttctttcgccatagcgacagccattaagcacgcccttgcctcggtcgttgttagatctgcaatattatctcctgggtaagtacctgatgccataactatcccgtctttatttcgcgcaatgactccagctactgaagtatgctagatctggttaaaagacgcatcaaaatttatttttattacatctcctctgggtggtagccactccttactgttaatctcagttctgatcttcattacttctctcatgtgtttaatttctgcatagtatgcgttgataaatcccactacttcatgcactaggatcctttttccctcatgaaacactctatttcggttgtaccaaatagcccataacaaaatggttttgattttacattcctcgtcagtgagatgctcgaaatcagtccctaaccatgttttccaatttgtttctctattgcatgtcgcattgatatctcccaaatcccggagtacttgtcaggtaaagttacagtccctaaagaggtggctcaccgtttcctcttctgcttgacacactggacaagttgtgtttatcaccagctttcagagtttc

SEQ ID NO: 14255 - DNA, 623 bp, Gossypium hirsutum
tgatgttcgataggattaattcaaagatactggagatgtatcaagaatacaatgaccaacccccttggatgatatctggaaaaaaaatcattccaacatggaacatcagagagcttgaagatagcctgcacaagtcactagtaagccaaaacaagataaggcagatggatgtaggagagatggtgcttgcaggggaatgtctatggttagacttgagatgggatattgatacaataggacggggaatcgagaggttgttggtggatgaactagtagctgaggtattggcaggttagtaaagatgcctttggtttaggaaatttatatacaaaatgctggaataggtcggatatatgatcattcatgcctgtatcaataagttctacatttttacagcagcaagaattatggaaaacccagaatatcaatatagactttggttgaaatgtaaaaagttaggtctggatttagtagaatttgttaaatgactaaacgttttccccattaatttcaaagcccatattcaagtagcgatgagttgaatgcgacgtactcttaaaacgaatgcatcccactgttgcagccacttttaaaaatattcctctattaaagccatctcccaa

SEQ ID NO: 14256 - DNA, 556 bp, Gossypium hirsutum
gaaggttatcctcatcatgcttgttaatgtcttcacgactctccaactaagcagattacttacagttcaaacatactataaacaggggcagccaagtactgagagtgcagcatggagtgagatttaatgaatgaatgtattctctatgattaccttcatataatatggaacggtgaatttagcaattttgtaatgataaaatacctctctattaacaattatttaagattattattaagacaagaggcctaaaaaccaaacaagagtatcaacaaaattgctctgaaaaaacaattaataataaaaaatttgctttaagagaaatggtatttagcacctttactaatacaaaatcatgaaaaagagagcaacagttcaatcataaaacaaatgatcaaacataaagtttgggcacctttaactcttgaagatgctgttttagtatttttgcagcaccaagaaccattgagacatgagcatcatggccacaagcatgcatcttcccaggatttttactcttgtgctcccaatcgactgtttcctacgcatttgaaca

SEQ ID NO: 14257 - DNA, 499 bp, Gossypium hirsutum
cttttttgtcatttatttttcatccgattgtgtaaaatatcgtaaagggaaaaggaagataagggtagtggggcagccaccggacttcattaaattttctgccactctctttccaatggtgtttgattctgaatggtttcaaagggataatgacatttgttggtgttcttgatatcgggagaaaaagacggtatgaaaatgttaattttatattatctttatctgttttttttaataagagaaaaaatttaatttgttattctcctcggaagggataatgataatgtggaatcatagtttcatacaattttttcttatatggtaatgaaattcacttttattaatgtaaaattaatattttaaccaaattatatggtttttttacttagataatacataaataaaattaattatgaaaataaagtttattgtaaattatttatgagaatgatatgtttttaaccatgaaattagatgttgttaatgtgtcaagcaccac

SEQ ID NO: 14258 - DNA, 659 bp, Gossypium hirsutum
  misc_feature (67)..(68): n is a, c, g, or t
gctatataacctaagataaaaatgcttttaaggtaaaaaagaatcgtcttttacctttattttcctnnaaattctgtgccatattgggtttagtgtgtcacatatttatatatgcactaaagaagccttttgcttcaaccctcccatcagtcgttttcaaaatcatccctatctttctttttctttttcctctctcttcttctttctcttgtgtacagtagttaatctctaatataacatttcatttatgagataaatattaaaattatacacgagttttgatataatttataatgttatacatcaattttaatttggtatatttatatacattaaattttaattttaattttaattcaattttcacatctctttaattttattatctatgtggcacaattttctattaattcatgtgtaaattgttgacatggattttattttgttaaaaaaaaacaaacaaatttaaattattttcatctagattaaaaaaagattttgcgggagaaacaagaaatcattttcccaagtatgtttattttttaatctagatgaaaataatttaaagttattcattttttaacataataaaataacatgttagcaatttacacatgacttagcaataaattgtgcatcacagataacgagattagtga

SEQ ID NO: 14259 - DNA, 189 bp, Gossypium hirsutum
  misc_feature (37)..(37): n is a, c, g, or t
acaatatgaagtgaaaagaaaagattaccaaatccanagagcgttcaccattggcataataactaagggaaagtgattgttgctccctgtggggttggtattgccttcggaaattgacctgaattaacttaaaactcatgttaatgaaaattttgaaatccagattccagaaaatacatattagattat

SEQ ID NO: 14260 - DNA, 729 bp, Gossypium hirsutum
  misc_feature (686)..(690): n is a, c, g, or t
  misc_feature (692)..(695): n is a, c, g, or t
  misc_feature (699)..(701): n is a, c, g, or t
  misc_feature (703)..(710): n is a, c, g, or t
  misc_feature (714)..(721): n is a, c, g, or t
  misc_feature (724)..(726): n is a, c, g, or t
ggtcatgaaacaaagttaccatggctctttgatatgtcgctcctgcatttttaagtccaaatggcaaaactttatagcaaaatgttccccatatgtttatgaccgtagtcttttccatatcttcaatatgcatcttgatttggttgtatctagagaagtcgtccataaaggagaaaagtgaataacctgccgtattgtccactaacgtgtcaatgtgaggcaacgagaaattgtctttcaagctggctttgtttaaatcctcatagtctacacacattcatacttttccatcttttttagggaccgggacaatattagctacccattttgggtatttaaccacttataggaaatcaacgtcgaattacttcttgacctcttcttttattttcagcaagacatcgggccttatccttcagagcttctgttgaactgacttgcacacttcctttaataggagccagtgtaccacaatatcagtacttagccctggcatatcttgatacgaccatgtgaagacatctttgaattcttggagtaactcaatgaggtcttgctttgtctctgaggtgatgcaagttccgatcttcacctctttctcttctcctaagctcactgtaacatccctaattagggcttagttggaatagtgggtttgagaccataagtctgaaacccactatttnnnnnannnnctannntnnnnnnnntacnnnnnnnntannngag

SEQ ID NO: 14261 - DNA, 635 bp, Gossypium hirsutum
aaagtcaaattgtggagcatgaggaagtcgatttgaaaaataattattatgaattataattgactctttactaagaaaaactgggaaacaagtatttggaacaaaacctgggtaatcaatctatagtatagtatatgtacctttatcaaacctgccaaacaatggacatcaattccacgtggtactacacctttgtttaacttgtctcggacatactcttcttgactattctcggcattaatccggaatatcccttccgccttcaatcaacataacccatctttgtgaaaaccttaagcatttagaatacttaaaatcattaatccaaaacatacgcttagacttaaccttaaggcctcctcctgcatacagacgtttctgcatcatcagaagaatagttggcacactgttccctcggtcattataagagcactgcattgactcggcagaaactccgaaaacatttgcactgctcaatggaaaagatgcatcttgtatgtttaatatatcaaacaacatactaaatcatgcaagaaaaaggtgacaacaaaaaatttccaaaaatattttctaggagattccgtacacagcaaagcgttttaggttttcctgtttccaaacaaaagaaatgctct

SEQ ID NO: 14262 - DNA, 624 bp, Gossypium hirsutum
accttgggtctatttgccttttaaaccctctttcttttatcatttaagctatttaatcattcttcataattttacatttgttacagtttagtcttttttattcaattaaccatcgaaactttaaaatttcttgacgaaactttaatactaacttattaacactccataaatatttataaaaatatttatggctcgttttaaaaaatttaaactctcgatacctcattttcgattctaattttttttaatatttatttctagtacactattcgctatttcaaaaattttcctaacttcacatttaacttatattcactaaattattaatatttttctaatcatttgtcggatttagtgatctcgaatcactgttccgacaccactgaaaatttaggctattacaggaaatatatttcatttccttattcaatattaccgtaaaaccaatagttgtactggatgaattgttgaataaattcgttcttcgaacgaaggtttgcagagtagaattggtgaatccgaattgcattaacaaatatcccgtgttaattctttttttttacttatctctttgactcacgttttgaatttgtatttatttctctcattactttgcttcttgcg

SEQ ID NO: 14263 - DNA, 566 bp, Gossypium hirsutum
atataataaatttataaaaaattgatatgaaagttaaatgtggttttggctgaaatagtaaagttgatagaagaaagtttttgaggtcttaagttcgaatctcattatgtgcatgtattttttaaaattatatgtaaaaagacaacaataccctcaaaattacattttttgttttataaaaatattaactttttaataatttcataactaaattagaattcggttgagagtgacattaacacaagcaaagttttaaataatagtctacatatatatactattgaagtcgcgacgttaacctcctattttcggagtagcgacacctctctatcgaagtctggactctgagcttttgcctttgatgttgcgacgctagcccgatagttttgaaaaattttacattttagtcctcaatcggtctcggattatcgaaagagctttcgtaagctcgtttaaatcccaaatatgattatataacatgttgatgtattgaacttaataacttgtactaattgatgaattgaattgtaaataagatcgtagttgctttgctaacgaatgtgaca

SEQ ID NO: 14264 - DNA, 687 bp, Gossypium hirsutum
gttaaatcatttgtcctacaaccgcacaaaattttacctttgacattgccttttttaatcagatctaattataaaaccttcacatccttattcagttgttgattaagtcatgtcttcacttattttctttagtcttacatgtataaacatttaacccttttttttaagtcctggtacttgaactcttacctcttatttagactttataagaatcaatctaatatcccaatcctatatatctctctcggcttagctcattacatttcaatcccactcacatctagtctagcatcaaattttattgtcattgatcatactttggttcatctatcagattaccaatcttgttacgccagccaaataatttcacgtatttaacattgccattaccaccaaaattatctcacttttcacaattaccaagccacaatccatacatttcccgctattattacatctatacatgtgttgcttgttttacgcctttaagtcctaattccactttagagttactttctagtcttattccatttacttagttgcggctagatttaaactaataccacctttacacttatcatgttgaattcttaactatgtatatatatttatatatataatttcatactacaattccataagaaattgttcatagacaattatggaaaggtacctctatttctaggg

SEQ ID NO: 14265 - DNA, 500 bp, Gossypium hirsutum
ctaagggaactctaatctcgtctctcaacccacaaaggaaatgttggcaactccccttcttggtaggaaccattgccagcgcataacttctttggcatataaattcccgttcataacctaccatcattaattttcccagagtcaatgtgacaaacccttgcttccgatattctagatacgactgacccatatagtttttcttaaattcatttcaaaagaaagtccaagtaaaccatttagttgggatagaacgagttatagtgagccaccactgatacgcttcttctttcaataaagaaactacacatattaaacttttagcagacatactctctaactactgaaaaactcactcaacaatttccatgaaagaggccataaaccttcggatcaattttgaacctcaaaaagacacattgtaggtgtagggcacaatggtaatggtacaataaccatcacaatatataaattctacctaaagctcattatgattggatgca

SEQ ID NO: 14266 - DNA, 659 bp, Gossypium hirsutum
  misc_feature (562)..(562): n is a, c, g, or t
  misc_feature (615)..(615): n is a, c, g, or t
  misc_feature (620)..(620): n is a, c, g, or t
  misc_feature (623)..(623): n is a, c, g, or t
  misc_feature (631)..(631): n is a, c, g, or t
acgggttgataccttttgattaattatgatttttatccatgcactatactcattttgaacatttagcccatttactttaatttgatatgatttagtcctccaattaataatgatacattttagtacaaatcactaacaccgtaaattttttttttttatgtttcgggcttgaactaaataaataactcaacaactaattgaatttgactcaaactaactataactagtttaaatctgcgatgttcaaactaactaattaactataactagaataattataaatgaaaacccaaacatttatattggggggactcgaatatcaaattcaaaatttctgaagctttaaccttatcattaaatcaagactgcaccggtcgtaagttattttatttagttgactatgtgaaatttgataatatttaatcctcccattaataatgatacatccatgtattactacaataacattcaatttttactaatcactaacaccttaattttttcttgaagttctacgcttgaactaattaaacaactcaacaactaattgaatttgactcanactaactataaccagtttaaatctgtggggttcaaactaactaattaactatnactanaanaactatanatgaaaacccgtacatttacattgagtg

SEQ ID NO: 14267 - DNA, 594 bp, Gossypium hirsutum
aatcagaacgtcgatactgcaaagatcaaagaagggtaaggaatttgagaaacattggaggccaaaaatcttttcaattttgttttagggctccgatatacgtgtataggaacgaagaaaccctaaaaaaattagggaaaaaagagggaaagaagaggaaagatgagaaagaagaaggaaagatatgcaaaaattattagagaaaattaggaaagaaaggaccttaccttgaaattgtgagtttctgaggattagattctcaaaataaaaattttcccttttttgtttttggttgatgttgtaaaatttgggactctatttctctaccatctctccctatcgacgacaaatcagagtcaaacaaagagggggaaagggtatatatgtaatttcacactcctcccattttggtacacatttatttcatttaattctaaaaggtgcatttataaaattattttgttatgcgagtgagaaaatttatataaaatcaaatcaaataatatactcagcattcaatccaataaaattacattaaatctcgaatttaattatcgattgaatctttatccatcatcagagttgggtaaatac

SEQ ID NO: 14268 - DNA, 592 bp, Gossypium hirsutum
ccacttattaattcggtcaacacacataatttagaagtgatttttttcaagataattaaaataaaaaatggataataattttgagaatctttttatttctgaaaaaaagagagagagagagagaagaaaatgctacattcaatataatttggttgtgattgcaacgtcctaatttagacacggcattatttatataaaaacatagttgtaaattgatataaaaaataatatgaatatgatacataaaaacatttgaatttatttaatataaacttattatctatgatatttctcaataattcaaatataatataaatcaaagaaaagattttgcgagtccaggaataataaattaacatgttttctttttaaccatccatgaatgattccacgaacaagaagtctcaaatgtcgtttgttggagattgtatgacccaaatttcgtcacttattgaagaaaaaatacattggtaaaataaaagaatctgtagggacgaaagaccgaggctgtagcctgccacaaatctccattaagcacaaatttggattggggttgtgataggtacggaccaaacaacacaagttgaatcat

SEQ ID NO: 14269 - DNA, 608 bp, Gossypium hirsutum
  misc_feature (545)..(546): n is a, c, g, or t
  misc_feature (549)..(549): n is a, c, g, or t
  misc_feature (552)..(552): n is a, c, g, or t
ttttgccaagtttacgggtttcctataataaggaaactaatcatcttaatgtgaaattaacctaacatgtgcacatttagtatgtcacccttacatataaccatactaattcaatgggttaatttgtttacacaaataaagttcaaatgtgaactattttaagtgctaaattgtcaaaaaagaaaatatacaatgagcaatgtcaattaacttttatttattcaaatttgtataccaaagaataaaaagtgaagaatcttagggaaaacatagcttttttttttctttcaaaaagttacgttatccaaaattataatttaaaaaaatatatatttggtaaaagtaccatagagatctttgtactaatagtcggattatattttaacccctctactgaaaaatagacaaattagtttctgtatattagatcaaagagcaaatcaattcttttgttaaattttttatccatttttactattaaaaattagttcttgtacttcagcataatgtacatgtggtatgtcaagcgtcactatttgattatnntgncanccacatatttttttacagtacaaagagatggaatttttaacaaaaaggacctgatt

SEQ ID NO: 14270 - DNA, 693 bp, Gossypium hirsutum
tctgacactctcgaatcaatcacatatgcaaaataagctccacaaccctttcttacgatactcaaaactttcatcgaagatattacagcaggcaatccattcaaatcactagattcaattctgactatttcatcattctcacatctcaaatcaatagtttttcatttatagttcacaacagcatcatgcaaatttaaccaatccatacccagaattatatcaaactcaacaaaaggtaacagcatcagattagccggaaaaaaagtgtctcgaaacattaacggacaattcttgcagactttatcaaccaaaacacatctgcctagggggtttgaaactctaattacaaattttatagactctacagacaaagtcttattgttcactaagttcatacatatatacgaatgtgtcgatccaggatctatcaaagcaatcacagaagtatcataaaaagtaaatgtacccgtaatcacgtctggcgatgaagcttcttcacgagctcggatagcatagactttggcaagtgcactagccttggatctaacagttgtatcttttgttcctctttgactacaacttacatttcctatatttctaggaagtctaccacaaaatttttcattatctttatcaactaaatctgggcaatcttttataaaatgatttcgtgaaccacagctataacaagct

SEQ ID NO: 14271 - DNA, 612 bp, Gossypium hirsutum
  misc_feature (363)..(364): n is a, c, g, or t
  misc_feature (419)..(419): n is a, c, g, or t
  misc_feature (447)..(448): n is a, c, g, or t
  misc_feature (517)..(517): n is a, c, g, or t
  misc_feature (532)..(535): n is a, c, g, or t
  misc_feature (546)..(548): n is a, c, g, or t
  misc_feature (562)..(562): n is a, c, g, or t
  misc_feature (564)..(566): n is a, c, g, or t
  misc_feature (572)..(573): n is a, c, g, or t
gatatcttggaaggcaaacctcatggtcgatttatgagcttcgatccggttacgagaaaaaccgatgtgctagtcagtcatctatactttgctaatggagtcgcagtgtcacctaatcaagatcatgcaatcttctgtgaaaccgttatgtatgtatgtatggtttccattgctgcaatttgcaaatcctttttaatgcttgaacaacattcaattgcaggagaaggtgcagaaagtattacataaaggggagcaaacagggaggcctggagacatttattgatgatttaccaggctttcctgataatattaaatatgatggtgatgggcattactggattgcattaccatcggaccatcggnnatcaggaaagcctggtaaatcatcaataaatgtcccaaggcctcgctgtttgctnctctttatgtaatactttctgcaccttnncctgcgattgaatgttggtcaagcattaaaaaggatttgcaaattggagcaatggaaaacatacatacntacataacggtttcnnnnaagattgcatnnncttgattaggtganannncgactnnattagcaaagtatagatgactgactagcacatcggtttt

SEQ ID NO: 14272 - DNA, 579 bp, Gossypium hirsutum
tcctgagctagcgtcatattcatttgtgacattaactcaattaacgacattattcatatacaaaaatttaaaacacatatctacttattaagggtttagtaccaataaaagttcatttatgaaattatttaaggaaatgggccgtttctaaaagtaataacgagtatgggccaaaaacccaaaaatgcgctaacatagactcgttttcaggggataatccagaaaaacgcttccacgccaacgcttttttccttgtgttaggcaaaagcactttaacgttgacgtgtttttagccctgtttccccccaacgaccacctacaacgactttttaaaaatcagaccattgggcctccaacggtcaggaaaagaaagtataaacccacaactcatttttcgcaccaaattctattattcttccaattttctctctaaatttctcagaaaagctctcaaagcttttaaatttttaatttttgtctgaattgttattatttttataatttctaagaaatttgatcgtgttagcaatgacctagtaattaattcgtctcgatgataaacatatctccgctgaccaa

SEQ ID NO: 14273 - DNA, 676 bp, Gossypium hirsutum
ttacaacgctagaatgtagcaagggcattgcataatccaaatgacattcatcgaaacgcaaaagtcccataatgacatgtagcattctcttgattagtaggagctatggcaatctggttgtaccccaaataacaatctagaaaaaaatagaaggctttccctgctaatctatctaacatttggttataaatggaagaaaaaaatggtcattccttattgctttgttaagttttcgatagtcaatacaaagccttcatcccgtgacagtacgagtaggaatgagttcgttgttatcattgcttgccacggtgacaccacctttttatgtacacgttgaatagggctcacccaagaactatcagagattgggtatataattccagcatctatccatttgataatctcctttttgacaacttccttcataatgggattcattcttctctgctactcgatagattttccatggcaatccttcagtaatattttgtgcacgtagattgttggactaattcctttgatatccgaaatcgtccacccaaatgccttcttagatttctttaaaactttcaacaagttagccttttaatctaatgtcaatgtcgcagaaataactattagcaatgtgttgttatcttccaagtaagcatactttagatgtactggcaaaggcttc

SEQ ID NO: 14274 - DNA, 425 bp, Gossypium hirsutum
  misc_feature (366)..(366): n is a, c, g, or t
tttcacacgcttgtgatgcagcgccggaaattttatgaaattaaataaagatatgaaaactccattctttgtcgacttaaaaatgaagtcgtgagattaaaagtgaaaatttgtaatttaggaatttatcaaaaaaataatttccaatttattgatgtgaaaattacaagcaaataaattattaggataatattatgaaaagagaaaccatggaaaagcccaagaagaagaggcccaatcgacagacggaaacagccgaaggaagttaccatttttgcttcgttaaaatcccagatcttttcatcaaccgaccgctcacacacaaaaagtcaagacagagaaaactccttccctataatccgctcntcgatcgctcacacacaaaaagtcaaaacagagaaaactccttccctataatccgctca

SEQ ID NO: 14275 - DNA, 613 bp, Gossypium hirsutum
ttggatgactattataataaaccagaaaccaaccatcagaaactatttaagctattgaaaccccaaatcccatccaacagtttcagttcattgtcagtgaatgctaaaagggttgttattgaaatgggaacggaagattttgggaagaatgagaattggatgaagttgacccaaggaaaggaagaggttggatcagcggttgaacttgcgcttttcagttcgctgttggatgacttcttaattgatctcctttcgcattaatttcttcaatcattttatgttttgcgactgggggtttctattttgtacattatttttatgctctaattccagtcttagctgtttctactctaattttctatttttataatgtttttagttaatccatgctgataatcctatcaattattatcattaaagtgatgatatgatttttttttctaatagtttaggcatttaattgacatagtttttttaatacaatatagaagtgtttatgggttggtttaggtcgggcttaagtataatattaacatattttatgctttttaaagctcggcccagcccaaaatatgaccttaaaatttcggccgaattgcccatatttgtaaaa

SEQ ID NO: 14276 - DNA, 677 bp, Gossypium hirsutum
aggttggactattagacgagggtgatggtggcggcggcggcggattcccagagggaaaattcaagccaaggccctggcagtcagctccaaagtaacctgcaacaagaagttcagaatttgaagtatttaaactcctatactcggttctctttgctgggttttaacctaacaagagagtgggtagtggcaacttacatggtttaaaacaggctagcccagaagaattaaacaaattctcagagccttgatggcattggcagatatatccagttccattactcacacattccccatcaccgcaccaaacaagatcacaatctgtcaaaagtaaatcaccttctttaattccttgagttggagcttgtataaatattaaccaccattcttaaaaatagagtaattgaaagcaattttcatcaatcaaagcattagatattgatttattcagtttctttttatatttgaaagatgatatacacttctatattcatatttgaatatatgttaagcatagatgtttaacaaagatattataaagaaaattaaaaaaacttatataacagaaatttctacgagtaacatgatttatttatactgttagtctgatttggtggtggtggaagagaaggtggcggtggagatcctttgccgcaatcaaaatcgactgtgccctgcaa

SEQ ID NO: 14277 - DNA, 646 bp, Gossypium hirsutum
  misc_feature (284)..(284): n is a, c, g, or t
  misc_feature (536)..(536): n is a, c, g, or t
  misc_feature (627)..(628): n is a, c, g, or t
  misc_feature (635)..(637): n is a, c, g, or t
  misc_feature (639)..(639): n is a, c, g, or t
  misc_feature (641)..(641): n is a, c, g, or t
ggctttcaacccagtggacagaaattctgaatgatacaacatacaaatcattaagagaagattaagaaaacattttgaagaaattttagatgccagtacctaaaaacccagaagttaaatcatcttaacacttctttcttaatagttttactgaactagctcacaactccatcacttctagaacttgcattattttatcaacgccgtgttcattatgttttcggagttgttgatacttcctatttattactttgcacttcattgctacaacccagtcattgggnaggcccaaccaaccttccccaatattttatgacaaaggtaatgaagtctaaactccattagtaaaattctaattaacaaaagtaggtacagagactcagaataaataaaaatctaaaatagtttggacatggtttcccccaatgaactcaattattatcagcctttcacatattatattcattgttaatagcataacagataaaaactattttaacctatttattagtaaattatcatgatttccgagatcncctagaaacagaaatagtgtcactctcagcatagaaaatgttcaagcagcagaaatagttaaccagaactcagaggacttacactgtcctnntacacgnnnangncggta

SEQ ID NO: 14278 - DNA, 622 bp, Gossypium hirsutum
cttttcttcgttcgagctactataagccttctatagatagaattattttagctgtgtttttaaatttccgtatttacgatgtttgagtgagctttgtaggtttctctttgtgtgtttgattcgtgtaatttacatcatgtagaggaaatatggttgatgcttttcggatgcatattatgcaaacgaaagaactcggtacatgtcctgtgcgacagattggaggttgctcgttcttttacatgagaatcagcaatgtatacatcgtaattgttgttagcagcaatgctaatgtggcttgtgctttcaaatttgttgttgaggtagtcagagagtcattcatattgttcctttttatttatatacaacagatttaccttatattccgctttcaaaatgttcaattcctagttgatgccggtatttttgctccttttgcaggctgtttctatgttcaaatcatatttcggtggtgcctttgatgaagatgctattcgtaataatttcgttctgatttatgaattgttggatggtatgtattcattaagagttgaattttactcatttcacattcgtcttcttgtttgtttacttctgtgttcagttaatgttctattgcggtgct

SEQ ID NO: 14279 - DNA, 678 bp, Gossypium hirsutum
ttagccgcgatagtgtttgcattgaaaatttggcgtcattacttgtttggtgagaaatgccatatttataccgaccacaaaagcttgaaatatctgatgaattagaaagatttgaatttacgatagcaaagatggttagaattgcgaaaagactatgaattagtgattgactatcattcagggaaagcgaacgtagttgctgatgctttgagaagaaagtccttattttctttacgtgctttagaaacacaattagctttctctgatgatgatttgataataaccgagttgaaagcgagaccattatttctacagtagatttttgaggctcaaaaatttgataatgaattgcaaccaaaacaagctcagtgtgagtcaactcctgatttaaaatttctaatagggcccgatgacagtttgatgtttcgtgatagaatatgtgtactaagaaattctgagctcattcgaaagattttaaatgaagcacacagtagttgcttatcagtacatccgggaagcacgaaaatgtataatgatttgaaatagctttattggtggcacggcctgaaacgagatatctcagaacttgtttcgaaatgttttatttgtcagcaaatcaaagctaagcatcaagtgccgttaggtttattacagcctattatgattcctgagtggaaa

SEQ ID NO: 14280 - DNA, 614 bp, Gossypium hirsutum
  misc_feature (553)..(553): n is a, c, g, or t
  misc_feature (556)..(561): n is a, c, g, or t
tgcacagacacaacaaagcaaaaatcccacgctgtggttagcaaattgggctccagaaccccgtgatatttattggcaaaatctggctataccattcctctcgttgaccattcggaaactaataatatcgttatcagtatttgctttggtatttttctacatgatacctattgcttttgtgcaatctcttgcaaatttagagggtcttgaaagagttgctcctttccttaggccggttatagaactgtaagttagcttcaatttcttagcttatagatactaggattgtgatttacttgtatgcatttttttgtgctaaagttcatccttggaatctattgctcacattttggacttatctctttatataacttataaaatgaaagtgggaagccattaaactatatacgagtaatatttttgtttattagctaagaattgtaggactaattctgtaatatgacttgtctgcaacttaggccactttactatgagaacataatcaccattatagcaggtctcgaactattaatatatttgatcaaagaatatntannnnnnttttgaaactttttgtattgctttagcaccctcacaaagtgttactgaaaata

SEQ ID NO: 14281 - DNA, 595 bp, Gossypium hirsutum
taatagctaataataaaaaaaggaaaaaatgcagtataaactaaagaagagggacagagggctattgataggctgcgtaagttagtttgataaacatacttgtttatttgttgaattgataatagttctacaatgagatgttatggaggtagatgattggaagattttagataaaaagttacaaaatctgtttaattagtaatttacattattgactgccaatcatcagtgtttaaagccatcattgagtttgcctatatatacacatacacatacataaacaagactctagttacctatgtatatgatgtaggacacttggcatgtagattttacattttgtctgatttttgatcttaaaggtgttgcttaaaattgaataacatgagcataagaaacttttaagctttgtattttccttgactagattatgctgattgcttaaaggtatattactttttcatttatgaagcatttgtaatggtttcttagaaagtttacttcttcttgtgaatgctggttgaggagtgtttgttatggtgttatggaactttcacaggactagtagtctaactactactctggctgggttcta

SEQ ID NO: 14282 - DNA, 582 bp, Gossypium hirsutum
  misc_feature (398)..(398): n is a, c, g, or t
  misc_feature (400)..(400): n is a, c, g, or t
  misc_feature (416)..(416): n is a, c, g, or t
  misc_feature (430)..(430): n is a, c, g, or t
  misc_feature (439)..(439): n is a, c, g, or t
  misc_feature (449)..(449): n is a, c, g, or t
  misc_feature (461)..(461): n is a, c, g, or t
  misc_feature (511)..(512): n is a, c, g, or t
  misc_feature (516)..(517): n is a, c, g, or t
  misc_feature (553)..(558): n is a, c, g, or t
aagcttctttcaagaacctaactaatagctgtcatttcattgttgcttttatctcttatatttgttctggaaatgaaaggcaaacagcatctctggtagtgaatgatttgaagaatatatatctttgtgagaatgaaatacatagctttacgtttacaaactttgggaggggatgggttgcacaaggcttgaactcctatggtgccaatgtacaacaaccttgctactccaaatgtggctacatcttcagtgtttcattttaataattttttcgatttcagtaattaagatttccttttattccttggctttttcccattggtgtttgaagcaaaatggaactaagcaaatgaagtacccaagaaatctatttttttggtcttgccccacctcatttntnatctgatgaaaaaatnaggaaaaagggaancacacttanaaaaaggaangatttgcacccncttttttttctctgaaaaagaaaaaaatttccaaagtattaatgcagccnnctgnnaaggaactttgtcacttgacattgagtctctggggnnnnnnatgtaaaaagaaccaggctccttt

SEQ ID NO: 14283 - DNA, 639 bp, Gossypium hirsutum
  misc_feature (75)..(75): n is a, c, g, or t
  misc_feature (503)..(503): n is a, c, g, or t
  misc_feature (581)..(581): n is a, c, g, or t
  misc_feature (584)..(584): n is a, c, g, or t
ttgtcagagtttcgttcctgatctctctttcccctccagagtataatttgttcatccttgaacaaaataggtacncaaggagccaagtcctacatttacaggaaataagaaataaacctgaaaaattagaattggattgaagaacatcaacatttctactaaaaattcttgtaaacagcagaaacaatgagaaaataggagtaatacccttagctttacaccgatccttttgcagtcactcgtaccaacatgggtgcagtctagtctaatcacctcctcagtctcgaatgcctcccggaccctggccactacgtttacatacactccattcctcgctgaacataagatttcaccatcagcatttactcgaacaatccatttattgttatcaatgattttgcaaacaagtatctgaggggcactctttaaagttacaatatatagtactatctcatcaacactataaacagtatgacttactgagtttcataagagcaggagantggagtcctctatttctcatttccttggtttcttcaaacgtcaggccatcagcaatgtttttcacaagcttcggatanatnggagcataaggcttccatagcataagaggtataactggtcggttttggggatcat

SEQ ID NO: 14284 - DNA, 605 bp, Gossypium hirsutum
  misc_feature (562)..(570): n is a, c, g, or t
  misc_feature (572)..(576): n is a, c, g, or t
  misc_feature (579)..(590): n is a, c, g, or t
tagggatgctttgctattgaggtttgatgccaaatttataggcagaagcaacatggagatgggctccaagttgggtaggatgctggcaaatgacatgcattatattggattaattatagagggttgattattatttttccgcgtgtttttaaacactgtcaatttttattcggatttgttctccatatattaaagacgtactctcatatctcttttacttttctatatacctacttgatatatttaagttttcttctacgcagttcccataaaaatcatgtccagataaggttcttgtaaatggtagttacagtgaataataataataataaaagtcattagagtttgtattagtaattgtattgtacttgctacactttatgcatcattggtgcataagtctcatacaccattagtgaataataatatgacacatcattattagattaaacaaaaaatatggaggacttgtaaataaatactaataatttcattactagtaactattataaataaatattaataactcttggatttagggtttaggatcttgagacccccnnnnnnnnncnnnnnccnnnnnnnnnnnncccttttcttcccct

SEQ ID NO: 14285 - DNA, 654 bp, Gossypium hirsutum
  misc_feature (649)..(651): n is a, c, g, or t
taggtttccttttattttatcttttgttatcattgtatgaatcacaatgtatcttgctgggaggatgataggccttgtcttgtagtgtggaaaaagtttattctgatattagtccttaacgcctcttatttatttatggttataattgcaccttttgttatttcccatttttgcaagcaacagtcaatgatttatttctatagccattaataccttgaggatatcattagggatttacattgttagcttcactcaataagattacaaaagtagctttgggcgcagggtggagagaaaatcgaagagatggaaaattggagaaaagtagaaagacaaaatatatatatttctttccattagtttgtttggttggaaagattgattagtagaatagtaaaataaaagaaacaaaatgaaaatcttaaaaaatgcatgcttacatctttctgattttctctcattttatcattccaatttagaatgatatgtttttatgcatttgattagagtagaaaataataatccatgttattttctttatcgcttttatttcctactaagcacactcaaaatcttacttttccactcttctttttctatcctttcacttttctactctaccaaggacattctgggtgctcaagtaaannnaag

SEQ ID NO: 14286 - DNA, 572 bp, Gossypium hirsutum
atttaattttaattgaattaacaatttaaaagcaaatttattaatttaattggaaaatttttaattggctattgatataacatcttttaaaataatttggtttggaacaaaaaataatcaagttacttaaaaaatattcgatcaaaggtacatccgagaaaaaaataataataaatatatttattaaaaattcacataaaagaaatagtgcattagttataatgataaaagttcaaaccttattatagtattattttatttaaaaatataaaaatataaaaagacaaaaatatttttatattatcactttatatagagaatattttaataattttttaattgaattagtgctcgtataatttgtgacacaaacttaataaagtatggataatattgttgagattgatgatggcttagtttggatgggtggtgtgtttacctccggtgagattaaaaacagcagtggcggtaagattcgttactgtagtggtgagattggataatgtagcggtaagattagaaacaatggtggactgtgtgtttggattcaaacgcagctgtagtggtgagga

SEQ ID NO: 14287 - DNA, 687 bp, Gossypium hirsutum
  misc_feature (42)..(42): n is a, c, g, or t
ggccgaaccttagaacttaaaaaatggtgtttcttgattgtntgtttgaagaattggtggtaagggtaaaaataaagacgatcactcttttgtttaatattctaaaatatattattattaatttattaaaaatttaacttataaaacaacaattaaccgtccaaccaaataaagaatggtcctattgccatttaaacccttgtacaattactttttagctcatttaactaataaaaatcattagcaattaacttttatgatttttacaattttatctttatatcttaataaactattaaatcattaaaattttcagatcaaatctcaattcatttatataataatttcgtaaatatctaataataatatttacatactcaatttataaaaacgaaatttcaatccttcatttttttttaaatcactgatttttgatactataattaattattctattaggaaaacatttcgtacaggtattaactataatattatatttaattcataaatatttagtggaattaacccatttctatttcctcctcttttcgtcctctccaaactgtacttcggactttaataacaagacagaacaggaacgggaagaaatcatattgttgtggttatctagatctattgtcaactcgctgaaactcgacaaaaacaatgattgaccatacagatgct

SEQ ID NO: 14288 - DNA, 638 bp, Gossypium hirsutum
tgctttcttctccctctgaaatccggacgttataataaaacgatgggtgtttcttggacacggctcaaatcatttctgaaagtacttgtttcttggattccaatggccacaaaccccgtcagatatcgattgaatactcgtaatcgtttcttcttatgccgcacttgcagaaaccacctcctcaccttggacaacgtcatcattactgtaataactctctctctttctctcttatgaatatataaaggtttttcttttactactggaacttcagttcttggttttgttattcataggattgcttgttcttgattcttgtgttgttcaagcaaagaatgattgggacttaaaagctttttatcttgaaaaccttataaagtttcaaaatgttcatgtgagaatcattgtatgagtagatatatagacctatacgtacattatatatattatcattataagttgtcatcttactttaaacaaacttttcagatagaaggggtggtgaatagatttctctgccacaatgcgtaagatacttgtctcattacattacattacattgtgtaatagagtagaataaatattatagattaatcattgcggttgcttgatatttgtagtgtcaatgtgaagagcga

SEQ ID NO: 14289 - DNA, 640 bp, Gossypium hirsutum
aatgatagaagtgtcataaactgacatataatagaaaagtgaataaaatgactaatgaaaagccttaattggaataataatacaatttgaggacttaattataacgttgtaaactttaaaagatcattttagaattgagctatagtttagagggagtatgttgctattaaccctaaaattgtatatctgaaaggttttctaggattttcacctttaaaatttccccaactctctttcgcacatcccgccgccaaacaagccttctctcgtcttcaagtttttccgacagaccaggcgattaaataaggtaaaatcttggaaccctaaacttaatttgaaggttagtttcttgattcgtatgattttgtgctatttgtggtcgcgattcgctgctattttgatgtgaaatttatggtcttaatcggtggcggacggcgccgcgaagtcgctatgccgccgttgtttggaacccttaatttttcatggtttaaaacaaaatcttttcttttttaatttttatgcagatggtgaagaaaaaggaaagaactttaaatgagaccgaatcatcaattgatttgaagtcattgattcatgaaaatgctttgttctttgacaaattgggtgagttaatccctgctag

SEQ ID NO: 14290 - DNA, 623 bp, Gossypium hirsutum
gaaatctcttactttcttttaacataaaatctttctttcaatgtctttcaagattatgtggttttgaaggctgttacatagccatttctatgttatttgaatcatggattaatgcgtcttcatagcagaggctatatatattgtgaatcttccttcattaccgaatgttttctttacaaagactttacattcggttttctctctttctttggttgctccagcgtagatctgcacacgactggtcttttagattgtcgtatggaccaagatggattacatatattgttggcattggtaaagtgctttcttgattgctctcattacgacctttacaagtatatcatcttagaattttgaaattctattttttcttctgaaaggtggaatgactggaatcatgttggttgcctttaacttcttaaacaagttccaatatactcgtgaagatgaagcacgtcttcgcaatggggagcttgcttctgcaagagcccctctgctttcacgcaaagccgatgatttatcaagtcgaggatcatcttatgattccgtttcaagtgatgaggcagatcttgaagattttctagcgggttctcttgaaggcacatcaataagagatggagaaa

SEQ ID NO: 14291 - DNA, 701 bp, Gossypium hirsutum
accttccagaaatatgggaaatgcaagtggtggtcaaagagctactagggatactattgttagatctaaggccagagcacctaccagagcctatgctatccgaactcgtgaggaagcctcgtctctagacgtgattactggtacttttactctttatgatatttttatgattgcattaatagaccctggatcaacgcattcttatatcagtaagaatttagtgcacagtatgacttcacctgtagagtttaatgaatttgtaactagagtatcgaacctgtaacgccctaattttcaggttttctgtgtttttgtgattttttaaaatttgtgtgtgttctggttggttaaaatatatattttagtaggttagtgggcctttggaaggcccaaacttaagttaaatccgtggtagtattcgaaattttaattttatgaacaggtgatgcaattagcgtttgggcttttaagagtaaaggggtaaaagatgacacagaaaggagtgtggtgtagtggcaaggtggcgccactcaagggacaaggaagtgacgccatagatgaagcaaggggtccaaggttcaagtcttggctcttgtaatatattttggtttttcttttcaataaatctggaagcaagtaggtgcgctttaaagtttaatgtattggatttatgacacaaatgagttgatggcctagtggtg

SEQ ID NO: 14292 - DNA, 355 bp, Gossypium hirsutum
tggcttaaatttcattgattagcctccatagcaatgaatatgtatgcattcactaagatcaagcctttttacttttgtgtctatcccagttattcaaatacctgtgtttgcaaacaattaatcttctctcttgtacttacatatatctttttcctggcatataatagctaagggacaaattaatgtcaaaacaaactcacggttaacttttattgtctcaaggtgagctcgtctgcagattctcctaattccaagttaattgatcattttgttgggatggggttctcccaggaacttgttacgaaagcaattgaggaaaatggtaaagcttctaggtctttactacttagagcac

SEQ ID NO: 14293 - DNA, 521 bp, Gossypium hirsutum
  misc_feature (57)..(57): n is a, c, g, or t
ttttgttatcatttgcttatcattaaagtgtattcaagtatatcaacattcctgcanctccctagcattaacactatattatgttctagatccaaatcaaacaaaggaatgcagtttaagacatcaacaattgaaatgcattgatctatgattagagtcatttgctacggacaaaacttcaattctacataatttatctaatatttaggcaagacttttaagcacaatatcagcagtgagacctttatggtttgaaatacttgtggccaatttttttttaagaagttatacaagtataattacaaataatattgtataaagcacaacttaactgaaactgaaatatatcctacttgcgtccaatacatatctaaatatgagtaaagagatatgattctctaaaaacccaccaaatacatgaaatagcctctctttcacagaacatattttgtttaaatctaaactttaggataataacaatagttcaatgatggtgacaagcactcattagtggcgaaact

SEQ ID NO: 14294 - DNA, 624 bp, Gossypium hirsutum
  misc_feature (616)..(619): n is a, c, g, or t
  misc_feature (621)..(621): n is a, c, g, or t
tctgtttgagtcttctcatctcagcttccacatcatcctgtggcatctgaatggttaagttccattcttaaacatgtatattctattctcttagctgttttgtatagtagttaattatgctcattttcatggcagaaaagtattgccttaccatattctgagatgaccatgatgtcctaccactttcatgtgatgttgaggagctctcatactgtgaactgaaatccatggacctgttgcctgagtatgaagatccaaggcttatgctgtcatattcagagctgatcgaaagccgttgagttccgaaatccatattgtcgtgcagagatgacatgttatcagtacttggcctcccactacttacgaatgatatgtcagattcaggaactgaaggctcgtatttatttctcggtctcgtgaacggtgacctgttgcaggcgattgaaaattttgagtttcaaagttacttgtatatatatatgttaataatattattactacttacttcatttccaagtcttcatacatgttgcgtggtggatgttgggacctactaggagctcctacagaagcaaaataaatagtgagtggagcgagatacaagtcaagaatatgnnnnangag

SEQ ID NO: 14295 - DNA, 469 bp, Gossypium hirsutum
aagctctgcaatagttaaaaatactggagggtcctcattgctatttacccattttcaaaaactataagtcaaacctttgtttccttttttcattttagtgtgtttgtttaaaaaaatctcgagattctttcttaaactaatttataccactattaaatattattagttgaattaattttaaatttataatttttgagttaatgatatgcaaggaatatattaaagaaattaatgcaagttactttcctatcccgtgtaatgtacatattaattgtattatttagaaattaaaaatataattattaaaaattataatgaatatattattatgggcaaactacaaaaataatcatttttatttacctcaaattacattttaatcatttatgtttgaaatgttacgctttaatcacctttatgaagtggtcactctaccgttaagttccgttacctccctaatggtagtcaa

SEQ ID NO: 14296 - DNA, 573 bp, Gossypium hirsutum
  misc_feature (268)..(268): n is a, c, g, or t
  misc_feature (284)..(284): n is a, c, g, or t
  misc_feature (306)..(306): n is a, c, g, or t
  misc_feature (449)..(449): n is a, c, g, or t
  misc_feature (465)..(467): n is a, c, g, or t
  misc_feature (527)..(528): n is a, c, g, or t
  misc_feature (530)..(530): n is a, c, g, or t
  misc_feature (532)..(533): n is a, c, g, or t
  misc_feature (566)..(570): n is a, c, g, or t
gggtggagttgaaaggcttacaatgggattatcaggcaaccttggatcagtaatgacaaagtttttctctatacgttcgagtgtggtggccaaatcaatacccttcctcatttccttttgtctaactttgtcatcaacactgtcaggcctatcatcatcatcatcataatcactttcatcctcatcagcatccaccaatagactattgtcaaagctatcagccgtattctggcttttcctcataagcctggaatgcatgcaaccaagngattttttttttcaanctaccataaaaaaacaaaaaanaaagatgttggttttttttctataataccccatgaaagaaagacggctagattttctgggtttcttttctgggacttcactgatacgttccattgacattcgaatacccccattggagttccttctatgtggaggtacgtttnctgagtttcgccttcnnnatggatactgctccttcaccatcatcgtcaccgcctgattttctagtgaaaggaccattnnangnntcactgagtgaacgaggtttcctcactgcttcnnnnnagc

SEQ ID NO: 14297 - DNA, 502 bp, Gossypium hirsutum
catgcaatgtacgtagcttctcttttgtcttttcaagacaaatcctaaaactgtacagaaaccaactcaaaaacacatgagattccatatatatttcatactttgattatatagtttgatgggtatcaattttatgatcagtgtaagaggatttgggtttgagtatactgaaatacactatctttctatttaaagattaatgagagactatgaataattctaaatattatataaaaaaaccaaatatgttaagaatttataatgaaattttatattttagtttattattcgtccaccacgttttcctaatttttttttgaaaaaaaaattaattttctattttgagtgaggaaaaatgaaagttcacaataaattgttattgacttgataaggaaaaaatttgatgtcatttctatttatatgattacaggctggagtttatattatactgtcaaatattttgactttacaaacctcctgaatctcaagctgggaatatcaa

SEQ ID NO: 14298 - DNA, 588 bp, Gossypium hirsutum
ttccgacccgtttcagtcaatacatcaatatatgctgattggtacaaatttataatattttaaatcagcttttaaattttttacttgatcattttaaattttttataattacatttaaaattagaagttactaaattaaatattaacttatatttacatataaatattttatatgggtataaatgagatattttttatgtatctttaatatatttttttatcaaaataatatataaattattaagaaactaaaaattatattagaaatatatttgtgagaaatatttaagtatatctataatttaccgagaaattaaaaattaaataataaatatatgtgtgaaaaatatttaaaaatacggataagcttaaaacgatatatcaaaacatacaaatattagtacataccaatattaaaataaaaataacatatctattgatataatactatctacatggattaaaactcatgcctctaagaaaaaaacatcaacttaattggaaacttaatgcattattgtttttcttcattgtagaaacatacctttaatggaaattaaatacttgtggatcatgcctatagtcagt

SEQ ID NO: 14299 - DNA, 523 bp, Gossypium hirsutum
attgcgatgggggtagatatgtgtctgcatttgtatctgaatttgaatatgcatctgtatttgtatttgattatgaaaatacataggattctatatacgagaatatgtttgaatctgtatctgaagacgtatctgtttattgttattttctttttttgtatctaatttgttgcttgggatatgttatacactaagctttatagcttctccatttgttgtatctttgacttttcatgtaatcattaagtttaggatcggacagcatgcaagagctcggattgatttctcgcttaagttgatttgattatttttaattaattaagtttttcggacttttgatttttggactaagtttttggttttggttttggttttgttttcgccgggtgttttttttttggtattttaacatgaaactgcaaatcatacgatttatcaaattagaatccggtttttaaaaattaaaactctaaattttccgctatgaaactaaataagtcattaagtgattttactataagat

SEQ ID NO: 14300 - DNA, 619 bp, Gossypium hirsutum
  misc_feature (612)..(612): n is a, c, g, or t
accttgtactcattcatttttaataaagggttctaattgtaattaaaaaatattataattgtcgagtttcgactgtcaaaatctaatttcattagttaggagactgagagtttctgattttgccaccaacaaaataaatcatatgtccaacccttagtctattcattgaagcatataaagtactgttaggcgaatatcgaaataaacgtgacattacggaaaacctgcaaatgcttgaaccaagataaatgatgattatgatcagtctagtaaattaaacaacgtctttatttgtactgcatattaaattccatatggtttagaaacctacatgccagaattcgttttttaccagtcaattaacaaatcgaagactatagtttaatttgtggaattacaagacgacaacacatggattgatataccagagatggaccactttaaaaaaaaaaagttatttctatcttttatcttatttaaagggggcccggattaaaaagctcaggcatttttactttaaaatataatttcccccctttccaaaaaacaattaaggcctttcaaatatatataccattaaggcccaacatgaaaaggaaaaaacatccctcnccctaca

SEQ ID NO: 14301 - DNA, 623 bp, Gossypium hirsutum
gtttttgatgtaagactaacagatgattttgttagttttattttctacttactttgccttttttatatttaggatgatgctgatgaagtgacttggcaaacctacaaaggacagcttacagagaagcaggaaaaaacccgtgataagataataaaaaggactgaaaaggcaagcccttttcactttgtgaattcttcttatgaaatgaatttaatgacatttgtttttctcatttgggttgtttgtttcagttatctaaactttatttctaggtctttagattcaacttggaggtgtcactttctgatctattctgtgttagtgccctttttttaaaattatttattgcaagtttttgttctcgatgtagattgctcatatgaagaaagagatagatgtaatacgagccaaagacattgcacaaggtgggttgacacaaggccagcaaactcagattgctaggaatgaacaaagaataacacaggtttgttgaaagttacatggagaggagtctgctgtatttgtattggattatatatggttcgattgtgaagagaagtcacagaatattattgacacaaatcctacaatttttgtagatactggaggagcttggaagcttg

SEQ ID NO: 14302 - DNA, 580 bp, Gossypium hirsutum
tgcctatagtccctacttcttccaaagagttgttatcagatccagaggatgaatatgtggatgaagttaaagctgctgttacgaacactaccacacatccagtcatagtagaaaagaagaacaaagaaagagacggggaggaagagaaaatagaatcggtgaatattgactcggataacaaaagagataacatgaatcaaacttctgcaccacaagaaactgctactgtacctcaaaccactgcacccatatcggagcaaatttgtgagattagtcaactgattaatgatctcacgaaatcaaatgatgatgaaaacgaggtgccaatcaatctactcaaacggaagtagcgctacaagtacgctgccaagaaatccacctgacccaactatagtaacacaaatccttttaaagcttttgtttttatttttcatttgcatattttttttcatttttacatgtgtttttcatgcattcgtaattgttttcattgcattttctacatatctatttttttttgcataagtgatgttttgtgtctgatcatgcattaaagacaatgcatctcttaggtttaggg

SEQ ID NO: 14303 - DNA, 699 bp, Gossypium hirsutum
gataagactagctccaacaaatatattgaaatttatgcaatattcctgcattgaatgtaaagattacttgtaaatataacaacatttctttggataacgattattacctgataaatataactttcagtgaatgcaagaacagggaaatatttaaatatcataagtgggctgtctatgtccactccatgaaacataaaataagatctgcactgcaaacacaatcataacatcactaattgggataattatatagaacgcatttgtcaaaagcataggtaaaattttctcccatgctcaatgccacacctatgtgttcgttcattcattcattactaacataattaatgcatcccattatcatttgcgccaatactgaagttgtagatagtgatataaaactatgtgacttaaaagaccaatttattgtgtttttgtgtgcttacaaaatcctcaagtgtagaatttgctcgttccattgcttccagtcccaccattgctacctcctcgtggtttatctgcaatgggaggcaatccttcttaccggacggatcattaacctcttgataatctgcaatatatatatatttaaagtccagaacttcacaaaccaaccaaaataaatgtatataaaaatagaaatcaggttgacctctttcatcagtttcaaaacgaacccattgtgatgcttcttccagaaag

SEQ ID NO: 14304 - DNA, 651 bp, Gossypium hirsutum
ataaattattaacgaaattcttagatatcttcaacaagagtcagagattgattccttaaataaaggttaaatagactaatataccaaactaatttttatgtctaacacctttattccatcacatgaaaaggccagaaaactgtagggagtagcagagcttaaacaaaacacttgcatttagccacaagcaacaacatatgaacaattactcgaattcaaaaactaaactcctcttacttgaatcatgaaaaataacaattaaaaaccatcctaatttgaataaactctaattataaattacacccaccctgaatatttttgaagtgggacagatgattgaaacaagcaagacatcaagttctaactcgactagctcccaaaatataaaacattttgaaaaaataagcaaagagggaaaaaattaaaaaaaaagatcaaattgttctaaaaaaataacaataatgaaagaaacatcaacaccaatttaggttaattttttttaagcaattataaatatttggatggattgagggacttctttttactaatttgagccattgattgaggagaaaaggataaaaagctggctcatagttcgcgaaataaaaggataaaaggataaaactcgtaataactcaaaccggaaacaac

SEQ ID NO: 14305 - DNA, 647 bp, Gossypium hirsutum
caaaaagggaaaggaaatgtgattatatgttatgaaaaatgtagaatatagaaagagaatacaagtactatgtgatcagaaataaaccaaaatgcctatggactaaaaattagattttttctgtacaaaaatataagaaaaatataaggaaaacttacgctaaaaataaataaataaaatgcagaaaatagaagtccccccccccttttttgtccctaagttcttcatgacaaacttgatgagaaggtaatcatttttcattcaacacaatattggatttctgtttccatgttatggacattaccaaaaatataacacataacaagttacaagattgtttgtcaacaagtttaggttccaagataacatctttaagaacctgattattgcaacaatggcaacagaatgcatatgttaggtgcatattaatagtgttaaatctacagccacatacaaatttgtcaagctccaaaactgttgttgattttaggtcccatcaccaaaatattatcacttcacagctcaagaaagttgtggctcaaagaaaagtcaatgtccacagtagtaacacattaaaagtgaattttatatgttcaagactactacagggactcaaattcatgaagtacagatgtaaaggcaaacac

SEQ ID NO: 14306 - DNA, 689 bp, Gossypium hirsutum
tcagcttcctacatccacaacaaataaaggaaaaataactcaggttttgaaagttaaagctataggatcagaatagtcaattcaaaagtcataaatagcgaacctgaggagtattatactctataaaacagtaacctagggttttcttagtctcaggatcaacaggcatccaaagaccatcctccttaatcaccccaatctgactatagatttttcgaataactccctcgagtttctcaaacttttcacgaggaacaacagggagattatcaacaacgataacgtttccaaacccggaatcaaactctaattggtcatcgtggtaaacatcatcatcgtcactgtttaaaacgaaaattagaaaataataataataaaacacacgcacgcacgcacaccaacatacatatacatgcaaaattcagtctaaaatattgggaaagaaaattaggtttgatacctgataatgccacagttttcaccaggaggaagttggatggagctgaaatctatattcatatcgatgcccatttgtgctgctgtcgcctctatctcgttcattagcatcacctcggccgccatggggagcttgatctcttcgctttttctggataatatagtgatgttcgatgagatctcgaaaatctagcaattcaggattagattctatgggatttggtgattccaca

SEQ ID NO: 14307 - DNA, 661 bp, Gossypium hirsutum
tgaagttagcctttttaaatgaattccttgaagaagagatctatgttaagcaacctcaaggtttcaagtggctgataaggaggacatggtttatagattgaagaaagccttgtatggcttgaagcaaacaccaaaggcctggtatagcaggattgatagtttagggttcgaaagaagcatcagtgaaccaactttgtatgtaaaaaaggaaggatttgaaacacaactcattatgtccgtatatgttgatgacatgctagtgacaggaggagaccaagcaatgttggttgatttcaaagccaaaatgcaacaagtgtttgagatgtctaacttgggacaaatgtcctattttctaggcatggaagtaacacaaactcaagagggaattttctaagtcagtgagctttttccatgaagatcttaaacaaattctcaatgcaaaattgtaaagcaacaagcacaccaattactgttggagaaaagctatcgagccaaggtgactttgaacaggttactgaatctgtctataggagcttggtaggttgtttgctataccagactaccactaggccggatattatgtttttttatgagtttgctctcgaagttcatgcattgttgcaatgaaaagcacttccaagctgaaaaaagggtgctcagg

SEQ ID NO: 14308 - DNA, 634 bp, Gossypium hirsutum
aaaacaaactttgagttgtcaaatggttgagaactcaaagccaccatctttcaacttttcggtgccataatcttctactcacaaccaacaatgatgaaatttttcgcacaattaaaacacactcaagagacacaagaattatatgttccccaaatatcacaaagcaatcaacaaagttacacttgaactactaaccaagaatgcactaaatgctccatttctcactatgcattatatttttagaattatgaaacgaaatctcaaccaactcatcactatcagctaatattagccatatggtcaatatttaatttctaaaatcctaaaattttctagcacaaacaaaatccacaatagagaaatttgagtaggaaacctcaagagtaatttgtatgaaactgtgataaacaatttaacccacagaaatataatttcaagattgtctagcaaagatattcatgccataactaaaaattataaccacatccaaatttcatttcccaaatttctcaatgcccacacagtctctaagtttaacaactcacccataataaagcatgaaaaccacaaattgttagctaaaaaatcctacaaattctaccacaatggcacacgagcaagagagaaattaaat

SEQ ID NO: 14309 - DNA, 667 bp, Gossypium hirsutum
  misc_feature (545)..(545): n is a, c, g, or t
  misc_feature (626)..(655): n is a, c, g, or t
  misc_feature (657)..(664): n is a, c, g, or t
aaacttttaaactcaattctagaggaaaagcttaccatttttctgtttaaaaaataagagacacactaccattaatttggtagcaaacctaactggagcaattttatactaaagcattttaacataacaaattgcctcaaccaattgagtctaaaagctagaaacataagggatagcagtgcattcaaatcacaaataagagatgcaaggtcgcaaacacaaatcacgggcagtatataaagtcggcaagagcaagatgactgagactgtgggagaaatgatgagaaataaaaaagtaacgagagaaggatggccgaggtggctaaaaatttaggagcttagtcttagctatttaggttttagggtaaaacttaatatatatatatataaaggtaatttcgtaaaaacctcaggatgaccgagtctaagcaaaatctgacttccatcctaactatttttccaacttcaattttaaaaaacaaaattccgaccctaacggaatgagttgggattgtcggttttgattttttttttttgcccccccnttaaccaacttttttaatttaaggggaaaccccataaacccctttggtggaggggaacccaaaaaagggggggccccccannnnnnnnnnnnnnnnnnnnnnnnnnnnnnannnnnnnnaaa

SEQ ID NO: 14310 - DNA, 645 bp, Gossypium hirsutum
  misc_feature (579)..(579): n is a, c, g, or t
  misc_feature (581)..(581): n is a, c, g, or t
  misc_feature (583)..(583): n is a, c, g, or t
  misc_feature (641)..(641): n is a, c, g, or t
tatgtgctttggctctgtttcttcaacatattcaatctccaaatgtggttaaggatttaacaattgagtaaacaaaatgataaagtattataacgataatgatcaaattataatgttttttatttagaaaacaaaatataaagatcatttacccaaaaaattaaataatggcctaccataaaaagtcatttcttaatatatatatagagagagagatgaatggtatgtcaaaacaataacaataatgtgatcactgatttccttttcattttcttgggaggctaatatatatcatctaacatataaattctttctaaatatatatttctaaaatatgatgttagaattttgcacgtaattcaatttcaaaatttgaatcttcttaccttaattttctatttaaaatattcctctaattgtttacattattaacatttttggtcaaaatttatccactcatgcaatcctatcaatttcataaacataattttatgaatttttaacaatttcattatcataattttttaaaaagtttgagaattttgttggattttttttttaattttaaaaaggttattnantntttttttaaaaattatttttaggaattcttacttttcaatttttttgaattatttacnatca

SEQ ID NO: 14311 - DNA, 695 bp, Gossypium hirsutum
actttaatgctccgtttggaaacttgaatttgaaaatttgaatttggatttcaattattatgtaaatagtaagaatgaaatgcatatattatagtcaaattagtttagattcagtctaatatatattagaaaagtataaacacaaggatatgtcaaatccaaatatattttacggatttcaaattcattactaaataggcttctagcaaatccatggatttaagaaatgatcataaaggttacatttctaaataatttactactcaatttacactattttttgaaatccaaatccaaattctgaaatcctagttcccaaacgctacctaaagaaaaggagtattgcagcaatgcttttatttcgtgtcgacaatggcccaaaaaaacagtgactaataattataattatgaaaagaagaagcattcttaatgaacgaatccgacataggtaatttaaagatatgaaacgagacaatcacattggttttcatagctctcaaatgtacaacaaagaacagtataaagctggctgcttgtaatccaacacaaagttccctttttcttttttctttttttggcaccttagcatcacaagcaaaaacttgaattaccataaaatcaacatctatttctctaatccatgatgctaaagaaaaagaaacaagatttaaacatacccatccggataaacattc

SEQ ID NO: 14312 - DNA, 666 bp, Gossypium hirsutum
ctgtcttcatgagagtggaagcgtcggctgcggaggagggagtggtgttgttggtggcagtgcgaatggcaatgggcatgtggggatgcctataccgatgccttatggggcacctttggtgcctgtagcgatgccgatgtatggacatatgggtatgcatcaaggaggatatcatcacccgcagaatgggtatgaggcaaattcgtacgggatgcagcccagagattggtctggtgggaataaatatggatcggtcatgtcgtatcccaatcatatggctcccaatgataagttaaattagctcgatatttgtacaaaggtcagttcttttctttcttttattcacttttagaatatgatttttcagctttattgactgcttgaatattagttataaacttaaaagtgtaccatgctaacttgcttgaaattttggttcttataagtaatcttgacatattctgtgctataatactgttggctttggaacttgcatcatgggtgtttttggggatcttcggaatggaaagcgattgagcttacattatttagctattaccgagtaagggtgtgaacagtttttgctcatctataagaaaaggagtcagctctgtttttatgttactgtattatgaatttatgcctgttctgcatattaaatggctg

SEQ ID NO: 14313 - DNA, 1266 bp, Gossypium hirsutum
  misc_feature (640)..(645): n is a, c, g, or t
  misc_feature (648)..(663): n is a, c, g, or t
  misc_feature (665)..(685): n is a, c, g, or t
  misc_feature (691)..(691): n is a, c, g, or t
  misc_feature (693)..(696): n is a, c, g, or t
  misc_feature (699)..(701): n is a, c, g, or t
  misc_feature (704)..(717): n is a, c, g, or t
  misc_feature (719)..(728): n is a, c, g, or t
  misc_feature (730)..(735): n is a, c, g, or t
  misc_feature (739)..(740): n is a, c, g, or t
  misc_feature (744)..(748): n is a, c, g, or t
  misc_feature (755)..(755): n is a, c, g, or t
  misc_feature (757)..(762): n is a, c, g, or t
  misc_feature (764)..(783): n is a, c, g, or t
  misc_feature (799)..(800): n is a, c, g, or t
  misc_feature (803)..(805): n is a, c, g, or t
  misc_feature (809)..(816): n is a, c, g, or t
  misc_feature (821)..(829): n is a, c, g, or t
  misc_feature (843)..(851): n is a, c, g, or t
  misc_feature (854)..(857): n is a, c, g, or t
  misc_feature (859)..(867): n is a, c, g, or t
  misc_feature (869)..(870): n is a, c, g, or t
  misc_feature (873)..(875): n is a, c, g, or t
  misc_feature (877)..(889): n is a, c, g, or t
  misc_feature (892)..(894): n is a, c, g, or t
  misc_feature (896)..(904): n is a, c, g, or t
  misc_feature (907)..(908): n is a, c, g, or t
  misc_feature (911)..(914): n is a, c, g, or t
  misc_feature (920)..(920): n is a, c, g, or t
  misc_feature (925)..(929): n is a, c, g, or t
  misc_feature (931)..(935): n is a, c, g, or t
  misc_feature (938)..(947): n is a, c, g, or t
  misc_feature (949)..(954): n is a, c, g, or t
  misc_feature (961)..(966): n is a, c, g, or t
  misc_feature (968)..(978): n is a, c, g, or t
  misc_feature (980)..(985): n is a, c, g, or t
  misc_feature (987)..(987): n is a, c, g, or t
  misc_feature (989)..(992): n is a, c, g, or t
  misc_feature (1002)..(1023): n is a, c, g, or t
  misc_feature (1025)..(1031): n is a, c, g, or t
  misc_feature (1033)..(1036): n is a, c, g, or t
  misc_feature (1039)..(1045): n is a, c, g, or t
  misc_feature (1047)..(1057): n is a, c, g, or t
  misc_feature (1059)..(1063): n is a, c, g, or t
  misc_feature (1068)..(1068): n is a, c, g, or t
  misc_feature (1070)..(1072): n is a, c, g, or t
  misc_feature (1074)..(1083): n is a, c, g, or t
  misc_feature (1087)..(1088): n is a, c, g, or t
  misc_feature (1090)..(1090): n is a, c, g, or t
  misc_feature (1094)..(1097): n is a, c, g, or t
  misc_feature (1099)..(1100): n is a, c, g, or t
  misc_feature (1102)..(1104): n is a, c, g, or t
  misc_feature (1108)..(1119): n is a, c, g, or t
  misc_feature (1121)..(1123): n is a, c, g, or t
  misc_feature (1138)..(1140): n is a, c, g, or t
  misc_feature (1144)..(1160): n is a, c, g, or t
  misc_feature (1164)..(1180): n is a, c, g, or t
  misc_feature (1182)..(1184): n is a, c, g, or t
  misc_feature (1186)..(1201): n is a, c, g, or t
  misc_feature (1203)..(1203): n is a, c, g, or t
  misc_feature (1206)..(1206): n is a, c, g, or t
  misc_feature (1208)..(1213): n is a, c, g, or t
  misc_feature (1219)..(1221): n is a, c, g, or t
  misc_feature (1225)..(1230): n is a, c, g, or t
  misc_feature (1238)..(1243): n is a, c, g, or t
  misc_feature (1245)..(1246): n is a, c, g, or t
  misc_feature (1248)..(1263): n is a, c, g, or t
tgatcaaaaaaagatgcttttggggttgattgagcaagcggacatccgtgtaataggattttggggaatgggtggtattggcaaaactacccttgctaatgctgtatatgaggaagtctctccaaagtttgaatgtcgtttgtttcttaaagatgttagtgagaaaataaaaaaacagggggatgagtctttacgaaatgaacttctttccaaactattagacgaaaaagaaatttgtattgacaccccttttataagctacccttaccaagacaggctgaataataaaaaagtacttcttgtccttgatgatgttagggacccagaccaaatagattttatgggtgttaaatattttggtcctggaagtaaaattattgtaacatctagagatagacaagtacttagaaatggaagagctaaccacatacatgaggtaaagaagttgaataagaaagattctcttcaacttttttctacatttgcatttaagttgttgaatcctgttgttgattttcaagatctatcatgcaagtttgtagaatatgctcaaggtagtccacttgctcttaaagttttgggttctaatctatatacaaagtctaaaaaagagtgggagagcgaagtggataaactaaannnnnnttnnnnnnnnnnnnnnnncnnnnnnnnnnnnnnnnnnnnntctttntnnnntcnnnttnnnnnnnnnnnnnntnnnnnnnnnncnnnnnntcgnntttnnnnnctttggntnnnnnntnnnnnnnnnnnnnnnnnnnnctttttttttcttttnnttnnncttnnnnnnnnttctnnnnnnnnnttcttttttccttnnnnnnnnntcnnnncnnnnnnnnntnncgnnncnnnnnnnnnnnnnttnnntnnnnnnnnnccnngcnnnnctttcntcatnnnnntnnnnnttnnnnnnnnnntnnnnnntcccctnnnnnntnnnnnnnnnnncnnnnnntncnnnnttcgtcgttnnnnnnnnnnnnnnnnnnnnnntnnnnnnncnnnnccnnnnnnncnnnnnnnnnnntnnnnnctttntnnncnnnnnnnnnnggtnngngcgnnnncnntnnntttnnnnnnnnnnnntnnntttttctcccccccnnnttcnnnnnnnnnnnnnnnnnttcnnnnnnnnnnnnnnnnncnnncnnnnnnnnnnnnnnnntntcntnnnnnnccctcnnncttnnnnnntctcctcnnnnnncnntnnnnnnnnnnnnnnnnttt

SEQ ID NO: 14314 - DNA, 660 bp, Gossypium hirsutum
agcatcctttaacaacaaagatagccaatgacagtgctaataccacaatgttgagttccaaacctcttacttccatcatacttaaaaacctaacagctttattagcattgtattgtaagcaattaaaagagatttgattacaaaatccattaatcaaagtggaaaattttacagcatcatgttgaagacctaacttcagcatttcccctaaacagaaaacccaaaatcaatttggcctaattgacaagaaagcatttaatcaaaatgctaaaagcactatcgaagcatcatcaacactatcgaagcgtgaaattcttacttaacatcggtgtgggtagcaatggtgttaaaggaagagtggaaaatagaaagactccttccaccattaacaagtgaaagaagaataaagcttacccatacggcgacttgcattctcatcaatcgattccagtgataggttggaatcgcttaggagtggtaaatgaagtgtgggtctttggccttcaagttgatttgcttcctttcaggttgatttgagcgtgggattgttgatggctaaggaaaaaaaagtgaaaccgttgagaaatttcagtgtgagggtgttttcgaaagggaaaagaaggtcattcggtggaaaggttgaataaccaattcgacacc

SEQ ID NO: 14315 - DNA, 644 bp, Gossypium hirsutum
aagtgaagaactgtcccctacctgcagacattgttctcttagcattagatgtttgcataatgccagaaagaaaaattgctcgagtgaagcatcgttgtacgtgtttgtataataacatagatgtttggaaagagttccaacccatggtacagacatgtctcaaacattactaaactatgaatgaaaagaacattcaatttttgtaatttactgaccttttttcacaagaatttcaggaaacctaggtaagttggtttcatattcaaatgtgacaggagaatgaacaagcaagcttaatcattgtcatcagttatcagatcattgttatattgttaaaccaaaaggaaggcactgaaattttgaatcccaacaataatgcaccaatatcagataaacacataaaagattatcccattagtatacccaaacctcaaatttgacaaactttcactaattaagaagaatccaacatgaagacatatcaacagtaatcatatcaaagacaaagaaaatggttaaaaatccaaccccattacacgcatgtataagtcaaatgcaggaatgaaattaaaatacaaacaaatttcaaatgaagtcaaatcccattagaggaaaaatggaatcattccatcctcaagtgggtt

SEQ ID NO: 14316 - DNA, 469 bp, Gossypium hirsutum
  misc_feature (442)..(442): n is a, c, g, or t
  misc_feature (444)..(444): n is a, c, g, or t
  misc_feature (460)..(460): n is a, c, g, or t
tgactgttatggatggaaagaatcaagcatgcaatcaagatctcacaaattaagccagcaataagaaataaaataaataaattattttatagaatattctagtcttatttatgtctgttagtcaaaccctataatgaagagattagaatccttattattatgcactacctaaattagtcaacctagccttgttatttaaacagaagaaggtaatgaaaaatgcaagcagaatattattcgacttgagatagacagctctcctcttgagctccaaggttggtagtccccctttggaaaactccccttttttcccatcctcccccccttgggttctcataaaaaacccaacaaaaatcttccggtaactaaatcacaatctaaggatggcaacttatccttgaatctaaacaaagaacccctacattttttcctggggagccgncnggaaaaaaattacttncataaaaaa

SEQ ID NO: 14317 - DNA, 568 bp, Gossypium hirsutum
  misc_feature (32)..(35): n is a, c, g, or t
  misc_feature (61)..(61): n is a, c, g, or t
  misc_feature (524)..(526): n is a, c, g, or t
  misc_feature (531)..(532): n is a, c, g, or t
ctgttgcgatacgtttccgatgcattcacacnnnntaaagcagactttgtcttggagttcnctttacctgcggattgccgagatcctgaaggacaaaaggagatgcttaattcattatccatcattttacagcaagtatgctgtagcttacgagttgtaacaaatgaggagctagaggaagatagagatatgggagttagtgaagttatagcctctttagatggcataccttgtagaaaagagttatcagaagatcagtgcacttatcattcagaaaagtattcaagagaaagttcatcttggactgtcagtctcactgaagttaatcagagcagtagcactagcactagcactgccatgaaactcagaaaaggaaaaccaagggcgacatgggatgagaaattatccaaggtgaagcagcacaaaaaacagattagccttagaggaagtgttgaaggtggagactctactataaatgagattagcttttcgagtgcgactaggagaaaaacaggacagaagannnaaagnnaggcagaaaaaacaatcacattgcaagttctccgcc

SEQ ID NO: 14318 - DNA, 638 bp, Gossypium hirsutum
aaatccatcatagttaatctgtgaaaattgaacgttgataatgataatgaattgcaaacaatgaaagaaaatagaacacacataaaattttacgtggaaactcttttagaaaaaaacatcgggcaggagagaagataattcaccatgtcgaattcgaattatgcaagaagagagacaattacgtctatttattggtttaaaattttattctaatcaaagtcaaataaaagtaatgcagtaagattaaaacatcttattctaatcaacatcaaatagaaaaaataaatttctatatggattttatttgtgcagcctgtatcataccgagggggtcagacacttcctcgattgcgaccccaatctaatgttttgcttattggggatctacgatgagttttgatcttatcctcctatcttgtcacttatattttattttaacagtaatttgggtcacacaacttctaacataatctttaatgtcccttttggtgaggaccaaatcttgagaggattaaattggagtaaaaggaggatttgcctatagaaaagaggagtaactttggaacacttcattccacactttgaccgaatctttcaattttcccttcgaagatggcaatactgtgagctttccaaat

SEQ ID NO: 14319 - DNA, 616 bp, Gossypium hirsutum
tatgatctcataatctgacatcttaaatcatttcaataatggatatctttagttgaattcagcttaatacagcatcatataacacattgttattccatctcttcacttatcagactcacaatatctcccccaaaaccaccatgataatgacctaaatttctcactttaaactgcagtcccaaaaatcacccccctgattcaaacttcattagtaggccacacttgttaactatatatatagcctttgcttagttgagtactcaagctagaaacattaaaacaagctaaaacctaaaaagtggtaataaattggctaagaggtagcaataaatacctatgttacttggatttaagggtgcatgtgagatacatatatgtgccctatctgcatatattcaaaattttttcctgaatatttcatatatttagaggattatactcgtgtttctatttctgaatatccatagaacataggttttaaacacaattattcaggaaaaataatgagttcaagtaatataaataaatataatcaatcaaccaaaacaggaaaaaggtggctggaccaccttgccagctaaatcacgtgtaaaagtgtagcaaagcacgtgagtgt

SEQ ID NO: 14320 - DNA, 606 bp, Gossypium hirsutum
acttggccttacactctgaatttttctttctcagccattttggggcaatctttgataaaatgctcttgagagccacacttgaaacaagcctggtcattcatcctacactcgctgggatatcttcttctataatgttgacattggagtctgttaggtcttacattacccacacttgccattgaagtggcttgagatttaaaactcgagtattgcttcccgcggtctctgtgggaatacccagctgatacattcaaatggaaatacatttctttagatttctttaattgagatggaaatgacttactcatcggtcttttcctcgaatctctagcttcacaattggtcttcttcttctctttattcaactcttcagccttacaagctcgctggactaacaccacaaattctttcatctctaatatcccaactaacacacaaatatcctcattcaattcatcctcaaatctcttgcacatgatagcctcgggggaaacacactctcgagcatatgtactaagtttgacaaattctcgcttatattttgtcactgacatttgaccctgtttcatctcaaaaaattccttacgtttcagatcaattgacctg

SEQ ID NO: 14321 - DNA, 530 bp, Gossypium hirsutum
attccttacgagctgaactaatatgcttccagcttgttgagctcaattcagcttgttttcagctcaatgaactcgtttccatcttttattttatgcgtttttaaaattgctggaataaaatttatgaagttagttaattagttaaatgacagctcaaataaattatgttactttaatatgtctaaaactggacatcttaatttaagtattaatatgtttaaattattgccaatgtttaatgtgtcttaatctattacaaaaatttaatatgctctagccaaattaatgtgcaggatttaatttgtcttagatgttgattttaatgagcagacattaatatgcaataaccgaatttatttgttgtctccaggtacactcccttggacggcattaaaggaggcatgttggcgggatttaatgtgcagcaaagataggtattaaaggggcagttgcacatacaaaggacgtccatttaatgagctactgaagaaagcatgcatggaatgcattaaagaagaggctactggtga

SEQ ID NO: 14322 - DNA, 643 bp, Gossypium hirsutum
  misc_feature (56)..(60): n is a, c, g, or t
ctccaatgctggctgtggactcatttttggccaccatttttcgaacaccatattcnnnnntcatgcctagtcatttcgacactagtgatacattcaatttggaattctacctttctttatattttggtatttcttaattctctcaacatgattgaaatttcaattcatgttctatcaaacctcccttctctatttttggttcacatgctgtcactattaccaactacaagatagtaataactatatttcttaggctgcttttactgagttggggtttatgggacaacagtacagagatcatttagaaaggacttaatggtatcataggcccgtagactattttgaaaaaatcaatcaagtctctccaaaccatttgcacccaattgagccattgaacttacaagaatgaccaaaccaaaccaaccttttgactgacgctaaccggcagtttctaacagaattaccaatgtgctagttaatagccattgagtctaccaacaaatgctgacatggcactaccatgttagctaaaataaaaaattcaaaaaataaaaattatttaaaaattttaagtctagaatgaatcagaacaaataattatccaagttcatttgaatttggacacccatttgtccaattcatt

SEQ ID NO: 14323 - DNA, 609 bp, Gossypium hirsutum
aaattcgccaccaaaatgcggatcatataatactcaggcaagagtacaacggttccataaatttttatcggcttcccaataatatccggcacgaacaacattgcaagctttatactatttgtgcatttcctgtaaaaatgccattggtgcaaccgaaccgaaagcggagactagatgcaagttggccatactagtagtactgaagaaggaagaaattgttagaaaaatgtagcgtagctgtaagatcaaatgctcaaagttcttgagccattactgtgtaaatagggttttgcatgatattttgtaataacaaaaaaagaaaaagcaaaacagggtttttaatgtctcgtattttataaaaaaaagaaggaaattttcacatccaccttgttaaaggtaaatgatattgatttatttaataatagaaactaatttaatcggggatataccaacttcaatatagagttgtttatggtgatttgattttaaaaaaaattgaggtcgatttttcgttttattgtttaaaaaaaaatactaaaaacttcttggattggatgtattgggtcatagaggtcaaactaatcttgatatgggaaatgcataaaggaa

SEQ ID NO: 14324 - DNA, 644 bp, Gossypium hirsutum
ctctattctctgagccatccctctctttccttcaagttcccaacagaccaggaaattaaataaggtaattagttttgaaaccctaaacttgaacgtttctaatcgagttatctggtttcgatttttttctcttttggtttttcgatgtttatgcttgttactctgtcttatctcgtgattcttttttctgtttactttcttgatgaggagaagtttttttacggaaatagcgtttattgccgttatttccgataacactactgccgcgatctttagcggtggtggaggacggtgtcgctacacgaaatagcggcagcgatgccggcatttgaaactctggcaagaagtatttatacatttcttaaaacaatccatcagcctgaaccgatattatgtccttaagcgtatttgaactgtaattgcaatggtgtcaatttaggactcaattggctttaattatttactataatttgttgtgcataatagattttccttttagaaatttgagtaggtgatatgattcgaatgaaaagtgtatatatcatgaggcagcgtaattgtttcttataatcttttaccgaatgcttatttataattatcatgtttgttatgaagtcctaatataaacatcgaatggacacgca

SEQ ID NO: 14325 - DNA, 509 bp, Gossypium hirsutum
cttttaatgttgtacaagacccataattatcattatataagattcaaaacttttaaaataacaattttctcattgcaatgataaaagaaaaattagtcatattaaatatttttataattaaaaataaaaatacttttatttaggtgaaatttaatgtaaaatcagatggtaatcttaactcaggatatgtaaatttatagccataactttaaataccaaaaaagaaaataattccatatgaggaaatgatggatagagagatggatgtgacacttcaccgtcgaagtagacggttttatccactcatttctttacttgcattactattttcctctatattcttagacggcaaaaaaggttaaaattcagctaacaagatctctgctattttatccgacgctaaccaaagtaataaatattccttaaggaataattattgtatctaccttccaaccccttgaaggcttgtacctcaaatttccttacctttttccaacaccctgattggc

SEQ ID NO: 14326 - DNA, 727 bp, Gossypium hirsutum
  misc_feature (553)..(559): n is a, c, g, or t
  misc_feature (563)..(571): n is a, c, g, or t
  misc_feature (574)..(599): n is a, c, g, or t
  misc_feature (604)..(608): n is a, c, g, or t
  misc_feature (611)..(611): n is a, c, g, or t
  misc_feature (621)..(624): n is a, c, g, or t
  misc_feature (631)..(636): n is a, c, g, or t
  misc_feature (642)..(648): n is a, c, g, or t
  misc_feature (650)..(656): n is a, c, g, or t
  misc_feature (658)..(659): n is a, c, g, or t
  misc_feature (662)..(662): n is a, c, g, or t
  misc_feature (664)..(666): n is a, c, g, or t
  misc_feature (668)..(687): n is a, c, g, or t
  misc_feature (691)..(698): n is a, c, g, or t
  misc_feature (707)..(708): n is a, c, g, or t
  misc_feature (710)..(715): n is a, c, g, or t
  misc_feature (720)..(722): n is a, c, g, or t
  misc_feature (724)..(724): n is a, c, g, or t
tgtgtgttaggataagtggcaaagaatttcatgaactcttatgacaaagcgtttgtatttttatttttttaaaaaaaatggaggaaaaaggggaaaagttgcgctctttatttggatgtgaattcttggatcatctttgttttctgccactttgttcttattcttcagtcttatgagactctgatcaacttccttgtgtgtttacttctgggttctatatgttatctttttagatgagcaattcatgcaatttgcaaatgtagttctgagaaccttgttacagccaatgaatagtaatcgttgatccaaaggtgcctgcttgacaatgaacttggaagtttttgtcaagacttgaaataactcggtccaagtctgtcaattctaaacccactcataagttggtcatcatgttcaataacatggaaaatcagcttattttcatgttttaactttctcccaagaacacgctaaacctgtctatgttcttacttttaagtcctccaccgaaactgagccaatatgttgatagatgcaaactcctttacttgtcaannnnnnnctannnnnnnnnaannnnnnnnnnnnnnnnnnnnnnnnnntttannnnnctnttttctcttnnnnttaaacnnnnnncccctnnnnnnnannnnnnntnnttntnnnannnnnnnnnnnnnnnnnnnncttnnnnnnnntttattttnntnnnnnntatannngncca

SEQ ID NO: 14327 - DNA, 608 bp, Gossypium hirsutum
tcattcctgtttttctgctattgcattgtttctaaacctatacttatattggccatttttggcttgcagtgccttctccgaactccactgagcctctatgatgctgtaatacttctccatggagatagattaccttacccaaaacgtctcctcttcacatctgaactggaccaaggtatattccttggaggcaaaggttttcagttttcaccactattatattagtttgattttatcaatttcttcctgtggaatcattagtaatataaatactgttctggtcagggcggcatgtggctcatggcaatgctagcacttgtttccaccccttcctattgccttctgatatgaagggtagtagcttagagcaacttaaaaccaagctaatggtaaactttgatccactaaggtgctttgttggagatgtagaggtaagtatttaagaaaaaagcttagatgtcaatcttagcatctcaatcttttgtgcttacatattctttacttccgtagaaagggttctccaacagattgaagttatggtatgattcattaggaggtgatgctatcggtctaacatgggaacggtcaaaggtaagatgaatgacgca

SEQ ID NO: 14328 - DNA, 688 bp, Gossypium hirsutum
ttgctctgaggattctatttccatgctggttgaatacttcagcccttgattaaaagaaaaagaagaagaaataacagtatagcatgattaccaatgtttgtgtaaattatataatgcaagaaaaagtttcaattttgatatagcattttgtgttggatgatgctttatggtccgaacaggggatgtgacatccctatgctgtagtttcaattcaagatgctgcctttgcacttgaataaaaagttgcttacattcatattattgttatggttaattaaatagttcaagtttcttaccgctatggaatcatgtagtttcagctctgagatttggcaaaaacctactaaaataaactcggttttgggtagaagaatctatgactttagaatccatttttgttacctatttcttattgagtaccacataaatattagcatttaatatgcaaggttgcatttttatgaaatctatgaactacaagcctcaaggagtaatctaaacttaattgggtcgattgtatatttttacttactatattttaatgtatgagtttgatgttagatttatttttattcatgaatttgacaaatataaaaaatagaggtgacatcaaacgtcgtttccttaaaattaaaattttaaattgtccgtttaaaactttatattatcccaaattcgaaacttgcac

SEQ ID NO: 14329 - DNA, 620 bp, Gossypium hirsutum
tgtttcttttgctagtttatgggcttgatagttttctggtttttgaataaactgaaaaattatttcttgaaatcgagaactttgcttctgaatatctctgatgactgctccgataatcgacttatccatacctgttgcttgacatttctttatgaccgttttcgaatctcccttgattgtaactgatcggagacccattgctaagcctaactttactgcttgtaggcatgcatatgcttctgcgagaaacggagatgaaatattggagtggagggttgttttcaaggcttttaactctcccctccagtctcgaacaataactcccgacgccgatctatacctgttagaatcaaaggctgcatcaaagtgaatcgtgtcctgtgttctcgcttcccaatgtctctgaacttcatcagtcttcaaggtacgtttttccattcccactgtttcaatctcagctaaataaacctttattctgtgagcaagatcccttcctgatacaatcttcctctcatgcaccatttgatttcgtgagttccatattacccataaggcgcaacaaaacaccttacactactcattggttcctttttcgaagacccaagtaagccatgttctaa

SEQ ID NO: 14330 - DNA, 685 bp, Gossypium hirsutum
gagacaagagaccaaaccgtcgattttcgtcttttatttctacacttaatctaaccccactcaagcttgagttgacattaacatttttattaggtttgcgaaatattcaaaattttcattttaatttgcgggaaattattttatggatttttcttaatcgcatcatttcttttttaattatttaataacaccccaaatcttaaatctgatccatttggattagggttgaatttaaattcaaggtaaaaaaattgcaaaatttatgggtaaatcatattaaattatttgaatgaactgactaagataaccaaaaagattaaatttgccaaatatatgatacgcacataaaccttttctagaatgaattagaattattttatgaaaaaatatatatttcaaaagctaaaaactgttttttgggggggtgatttgtgaaaccatcatttgtaatacgactttaacccataaaaatgaagcttacaacattgttaatccaggtatggtttaaagtttaaagtttaaagtttaaagcaaggaaatgattaagaaaaagaaaaggtaggaatgtttaacacaaatcactgacataatctaaacattggttgtcaattgttggactaatcaaacaatactccaaattatgttccattttagaactagctttttcaaccttcctctgtctctt

SEQ ID NO: 14331 - DNA, 377 bp, Gossypium hirsutum
gagtttagagtagggtagtttggtttgttagaaacgccaaaggtgtgaaaatatggatgatagggtttcgggtgtaatggatgctctctgtaactgcctagacaggaggacaaagacaaagagaataatgtaatgaagagtgggagacaatggggttttaggaacattctgagctttgcttttagcaaagacactgttggattgaatatgctttaatggaggagtgcatatatatttctagtaaagcatgggggaaatgatatggatgttcaaacatatataaactaaagagatagacagctctgactctggaactgattgtggagaagcaacggcaatttaggccttagccggagaacggtgatgaaagtcaagaa

SEQ ID NO: 14332 - DNA, 641 bp, Gossypium hirsutum
  misc_feature (59)..(59): n is a, c, g, or t
gattttacattgtgattatctgattttttatccaatattatttgaattctagaacgtanccctgattctttgtcaaatgtttaaataaaaagaaaaaaagataaaaaaaacccttaattaaaaaaaccaattgagccattatgaaaaaaaaacccaattaagctcttatgaaaaaagcgcacccaattaagctttcactgataaaaaaaaaatcaattggcccttccagttaacggtaaccataagttgaccggtttgaccgttaacctcgttgacatggctaacagaagccaccagaaactaccatgtggtaatatgctaatgtggcatgccatgtcaataaaaaatatcaaaaataaaattttaaaaaatacttaaaaaattaaaatgtacatttaaaatgaatttagacaagtggttgtttagattaaatgaatgaaactggacttattattgtccaaatttattttggatgagtaaaaaactaaaaaaatttcaaaaactatgaaaaaaattataaaatatatataacattttcaaatatgcaaaaaaactcaaaaaaatatttattaaaaatttttaaaaaatatattaaaatttatattgaatatacgtagggttaatcaagcctatggggcaaa

SEQ ID NO: 14333 - DNA, 566 bp, Gossypium hirsutum
gttaaatatgtcaaattatttagatttttttacatatttgaaatttagtccatatacatttattttcaggcatttagttccttcactttttaaatttcaaaattcaagtccaactattaacattgttaacttttgttgttaaatttgttgatttgacattttgaaataaaaatgatcacttggcagttatgtaacttaagaaacgacattgtaatgaacctaaatttaactagataattttaatagttagacttgaattttgaaacttgaaaagtaaaatgactaaattcttaaaaaatgtacaaagactaaagtccaattttacgaagaatataaaaacttatagtacattttaactttttctttacgattgtttttttatcatatttaaatttacatatttttataatgttttataaataatatgaagctgtatttcataaatggctccaatattttaattcttaacctattaaaataaaggtgataataccaaaaaaccccatgtactatatcttaaattgcatcttaacccttttattgaaaaaatggacaaattaaccctt

SEQ ID NO: 14334 - DNA, 621 bp, Gossypium hirsutum
  misc_feature (58)..(63): n is a, c, g, or t
agctagtattatgtatgttggaaaccctacgaaatgagatgaagtggtgtgaggcaannnnnncctatgttaacgtatttatacaactttctcagcatgtgaaaatcctatatttacctatacatctggaaattgaacagtaggattcggtaaaaatcaaatcgcatagtaccttattaatttttttaatttaaaaaaaagaaagttattgaaattatttaaaaattttgtaaaaaaatatatatatcataaaatttttaaaaatgcaaaaaatattaaaaattaattaattattgatttgacgtccacgtgtatgtccacgacagcaaattaaacttttgataaaaaatttcatccattttagggtcatttgacaaaaaaaaaatttcaggggtaaaaaaggaaaaaattaaaaaagggaataaaaaaaatttttttttgaaagggtggaaccctaaaaatgtctttaaaccaaattaattcctccatttaaaaaattttttaactaaacttaaaacaaaaaaatttttaattgtaattgaatcaaaagggaagggaaaaaaaatttgaattcaagttttaagttgaaattgaatttgttcccaggggaggaggaggggg

SEQ ID NO: 14335 - DNA, 773 bp, Gossypium hirsutum
  misc_feature (648)..(694): n is a, c, g, or t
  misc_feature (703)..(704): n is a, c, g, or t
  misc_feature (707)..(758): n is a, c, g, or t
  misc_feature (761)..(769): n is a, c, g, or t
ttttagttttcccagttcctggtggaccccaaataagttccacatgagacttgtgagtgcacgccattttgttgagacaagcaacaagcgacttcttttgagattcattcagtttagatagcaagtttttcagaaaaatctcattccagtttccaccaatatctgaggaacagagactgcagctttctgctacctacatacaacatgaaatttaacaaaattcattcctgcgaatatataccattaaagcaacaataaattcctcaaacatggtcctcaagtaataacaataagtttatggaaactgtttatgaggttatattgaaacacatgtaaaccaaaaggaaaatatgaaatgcaaaactcatggtacgttaattgtgcaggacaaacgcaaggtctcaacttgtcaacacaaagaataagcatattgcatgatgcttaataaacatagccacttgcatcataagcaaccactaacgatgaaaagcaattgcaaatcatccagtataatgccacatttacagaaggaaatctcaaacatatttgcactgtggtaccataccatggaatcggcgtgcaaaacctctttgataatctttaagtttctttccatgtgcaatgcactccatattcgtgtgtttgtgnnnnnnnnnnnnnnnnnnnnnnnnnnnnnnnnnnnnnnnnnnnnnnnccccccccnnccnnnnnnnnnnnnnnnnnnnnnnnnnnnnnnnnnnnnnnnnnnnnnnnnnnnnccnnnnnnnnncccc

SEQ ID NO: 14336 - DNA, 658 bp, Gossypium hirsutum
tttgaggaaatttactgtccttcctgaaaagctttctcaagcttagcctttcatgttctgcaaaattacgaagtaaactttcttttctgatgaccaaatatttcaaaattaatatatatacacacataccttagcaattcaaatattacaactttaaagaagagaaaattaaataatcaataaaaatgctggataatctcccgaaatcataaaacaacagcaacataaagtattctccaaattgtaaaaatgcctcacaactagctagttccaaaaattaattaaagcagcaaagtcagagacaaggtgcagccaaaataaattataggccacccgccactaattaactatcaacaatagatcggtagttgttattcattatggaagacaagatgcagggaagggaggggcaatatttgtttatatttgtgagtttctcatcattcaagagtacagctcaggcatcatgtaattgtgaacttgtttagaggttcctaagtatctgaagtcctttttttactaaataccaagtaatccaattccaagtttccttcccttgtaatctctgaaaaattgttccccagaaaaatggaagaaagttgaagtacatttatcaaagaaataggaatccctcaaagggctgtcaatgaaagtgtct

SEQ ID NO: 14337 - DNA, 527 bp, Gossypium hirsutum
cgatgtgcatccacggtgcaggaatcttaagctattaaacttaatacatttaaccatgaattactcctcaaggataatgagaaaaacccatgaaaactcatccactcaactatatcaaacttcatacattttgacttcagaacatcaaaagaagtaccttaagagacccaaagatgcctgaaatacaccagcaaagaaggtagcagtgaaggccaattgaaggtagagaattgggtcatcagtagaggagacacttccactgagcattgtgcccatcactaaggatgcaatagacactggaccaacagcaagatgtctagaactcccaaggactgaataaatcaaagggggaacaaagcttgaatctgcatgaattgatggaaattcatattaatagaagttatttattttcatttatctattattgcattcaatttggacatagagccttttcggttccgatactaacataatccaacgataggtggcaaatttgcaagctttgcgtaactgataccctgcatcat

SEQ ID NO: 14338 - DNA, 557 bp, Gossypium hirsutum
tattgctggtttgttggttcttgcataccaacatgctttccctcttacctataaatcggattccaattcaattagggaattattaaaaattcattttatttgtaaagtaaattatataactacatgaattttttcaactttctatactttaataaaaattaaaaatttatccataatgagatttaaacaaaaaacattatgcttttactatttgagctcaattttttaaaattttatataaaacttaataaatatatttattataaaaatttgtatatatattaataatatggttgattgagttagtgtcataaattaactcaatattaacatagtattgatgacaacacaatgataaataaattgtatttttaatttgattatttttatatttaaatttcattttactctcaatttaatctattattttcattttaatataatatatatttcatatgttattattaattagttccaaaccgtacggatcattatttattatatgttatttttaaacatatcatgttctaaagatgtgatttccaccctatatgcaa

SEQ ID NO: 14339 - DNA, 521 bp, Gossypium hirsutum
  misc_feature (20)..(20): n is a, c, g, or t
  misc_feature (276)..(276): n is a, c, g, or t
  misc_feature (279)..(279): n is a, c, g, or t
  misc_feature (283)..(285): n is a, c, g, or t
  misc_feature (459)..(459): n is a, c, g, or t
  misc_feature (462)..(463): n is a, c, g, or t
  misc_feature (468)..(468): n is a, c, g, or t
tcaaacaaagccgaacggtnaatgaggaacagattctgtattgcaatgaacatgtaaggcatatatcgaatcgacgtaaacaacataatgtatgaattatgatacaatataacaaaggataagcaaaccagatagcatacataaaccttaagacactaacattcattaaggtactcaaatcattgttgcaatgtagaacagtaaggtagtcaaagtttcaaatcctaataatgcataaagtcaaccaaattagtatccttaaacatcaaaattggncanaaannnaaaggaaaaaaaaacaaaaaaaaaaactatgcttattactttacatggaccacacacaaatgaaacgattattttccatggaccaaaatgcaacaatgaagctaaatatacaaacaaagttccaagttccattaaaggcaaaacagaatcattccattctgagaattggtttcnacnnttcanagctttaaaagtgcattggagtacatacataaaatgcatgaagataaagcaac

SEQ ID NO: 14340 - DNA, 413 bp, Gossypium hirsutum
actaaaaagtagaaattagaaaggtatgacaccaaaaatatatatattttcaatattcatattctatatttatgttttacataaatatgtgatcgagattcgattttcgaatatatttcatgacaggctgcttatctctttgaagaatattaatgacgaaaaaattaatcataattgtatgattatgagttcagtgaatttgataatgttaacaactttggctccactaatttagcattgtttgattaattctacatttatttatttgttggattaatcgagtttactgttgataagaaaatcataattccctttctatcatttatttttcttttactcttttaattataacatggacagcattccacaaatagactaatactattgtgattaactcgaaacccaaggctgta

SEQ ID NO: 14341 - DNA, 572 bp, Gossypium hirsutum
aaggtttaaccagtagttgtagaataagttaatatataatgcattgctagctgacatcccttgacaaaaaggaatatatttatcatggcaggggtaataaaagcagttcaacatgcgttacacattcttccgacgtgttacaactaagtaagttgatgttatagaggcacaaaaacaatttaaagtgaagcatatcgttcaataggacatgcaaagcataatgcactaaacaactaaaaccagtaagaaaaaggaaagaacagagaaagggggaaaggaaacctgtttaagaaactcgtcatgccaattatcaagggtatcgaatgatttcataacattaacatcgtaaactagcacacagcaatctgcacccctatagaaagcgacaccaagactctgaaaccgctcctgtcctgcggtatcccatatctatccaatgcaatcaaaataaaccataaacatgccttccacgacaacttcaaaatcaagccataagaacataaaaatatccagaaataaataaaaataaaataaaatctctacttgcagagtgacaaggcgatcgtcaatct

SEQ ID NO: 14342 - DNA, 486 bp, Gossypium hirsutum
  misc_feature (56)..(60): n is a, c, g, or t
  misc_feature (63)..(64): n is a, c, g, or t
  misc_feature (67)..(71): n is a, c, g, or t
caagccgtgcattaaagtgagattaaactatcttcatcgaggattattctttcaannnnntcnncannnnnattttttgaactcatcaactaggaacctgcgggccttataaaataagcctagttgaagagtgtgtgtatgtatatataaagcatgtattggatatttcatctctgcttggatatttgatgaaggaaggattgaataaaaacaaaagcagataaaaaattgagtgaaagcaggattaactactgtttcattaacatgaaaggttgatactaagattatataaatcataaaccttaaataagctgaaatattaataaaataaatacaacttggcttaattcagttagattcatctttttcattggttggtttgtgtgtaatcacatgccaaaatgtttaattaaaatttatcacagttttaatacaagttgacaacttgcaaagtgaagagttcacaggtttaatgagctgacagac

SEQ ID NO: 14343 - DNA, 553 bp, Gossypium hirsutum
tcattgccttctaaccaatttgtgcatgtagatggaaagcgtaaagctgatttcgtcaagcaattgcaccaacgagttcgagaaaacattgaggcaaggaccaagaactatgaacaacatgctaacaaaggtcgtaaacgagttgtgttcgagccgggagattgggtgtggttgcatatgcgcaaggaaagatttcctatgcaacgacgatctaaactacttccgagaggggatggaccgtttcaagtccttgaacgaattaatgacaattcttataaattggacttgcctggtgaatataatgttagcgcgacttttaacgtttctgatttgtctccgtttgatgcagattccgatttgaggacaaatcgttctgaagaggaggggaatgatgtgagcttgcctacgaaccaaatggagaacgaacaagaagctattaagctgcccattggtccaataacgcgagctagagctaaacgatttaaagttgctattttagcattggtggaacggattgaggaaaatgaaagcaagagcttaagacgagctgaat

SEQ ID NO: 14344 - DNA, 662 bp, Gossypium hirsutum
cattcacgtaaaccatttcacctctactttgtttcttgactatcttcaagttatctctaagtcattatttatgtctgccaaaaaagtggaatgtcctcaaggtgtccatatttttatcatatttgtctgcctaagattatcaccaaattttaactagaaagacaagcactgtcattatatctttctttgaattaaaagcatcatccaaattaataaaagcaatgtcttaggcagactaatcatagatcaaaacgtataatctctagcaaaaggaaattaatgcaaaactgagataaaatgcagccaaatgtacatatgaattacaaaccaaaacacagaattcaagtcaatgcttagttttgtaattttagataatgcagaggaggcagaattgcccatatgcctggtggattgctagaactttcagggcaacaagtgaaagggcagatcaagttagaagagatgtcacttcattcagaaattttaatgatagcaccacttgcctacaatccttccaagggactcaatttggatgcaacaataatggcttatggttcttttctttagtatagaaaccaggcttaattaggattctaccctagcattttgccatgtatgacaaagaagcaatcatggcaggtatgcactgtagagcactgtag

SEQ ID NO: 14345 - DNA, 524 bp, Gossypium hirsutum
tctatgctttgcctctttacagtacagattgtatgtctttctatttgattttcttggggttttatttgtaattttaggttgggggcttaattttcttaatatatgtatacaatgaagtttgctatgaaataaaaagtaaagttgatgatcatacatgtttcacattgctcatctccattaattgctttcacttttttgatactctctttataagccaaaaataagaagattctgcagttataagatgaataaacttattataagcattttacagtataacctttttcataagtaacaagatacctttttcaaatcaaacagtaaataccagcacttgaacaagcttcaaaattcgaaaagtccaaatcaatggtgttgggtcatgttacgaaagtttcatttcatgttgaaatattctactgaattgtttgtttggataccatatttttgtcctgtgtctggatgatttatttggacattcctttagacaacagtttaaacatgccttcagtatagctcaagaa

SEQ ID NO: 14346 - DNA, 616 bp, Gossypium hirsutum
  misc_feature (506)..(529): n is a, c, g, or t
  misc_feature (531)..(536): n is a, c, g, or t
  misc_feature (540)..(546): n is a, c, g, or t
  misc_feature (554)..(557): n is a, c, g, or t
  misc_feature (562)..(565): n is a, c, g, or t
  misc_feature (567)..(570): n is a, c, g, or t
  misc_feature (578)..(582): n is a, c, g, or t
  misc_feature (584)..(585): n is a, c, g, or t
  misc_feature (587)..(589): n is a, c, g, or t
  misc_feature (595)..(609): n is a, c, g, or t
  misc_feature (611)..(613): n is a, c, g, or t
ctttttgaagaagcaacaataggacttgagttgtctacagaacagtcactcactggtaaattcaagaaagaaacttgctgagataatgattatactcgaaacaccatagacaaaggagtagaagaaataatagttgctaagggagaagaaggtctatttaaaacagaaaagaaccttcataaacaaaacatgcttggaaacaaaaaccatgccattatcatcaatacgcctataacccttgtgagtagaactgtatccaagaaatgtacacggtttggatttaaactacaacttatgtttattgtagggtctcaaacaaggataacaaaaacaaccaatgattctaagaagactataatcaagcttaatcttgtatagaatttcatatgaagatttattttacaacacagatgttggtaatcaatttataagatgaatggtagtaacaaatgcataggaacaaaacttgagtggcaagtgagcttgggctagtaagttaaccaaannnnnnnnnnnnnnnnnnnnnnnncnnnnnnttcnnnnnnntttttttnnnnccctnnnncnnnnttctcccnnnnncnntnnncttttnnnnnnnnnnnnnnncnnnccc

SEQ ID NO: 14347 - DNA, 446 bp, Gossypium hirsutum
tttttgggcttgaagcctgaaggtgcaaaaaggcaattgttgggtacttttggggcatcaaagttcattgaaaatccttctgcatcttacattattggattagaggaggatatgactgtttcttttaagcataaatgctggataatattagctttattttgatttcctcttaaaaggaaaatgtttggtttggagtgttctagactcatagctgattgacttgttacattttgtagatcttcgtgagagatataggctagaattggaaaatttaacattgactacacagccagtcaaaacatcaaggtttttccttctggctatccttcaatatatcaagcgatcagcatcatatcttttggcaaagggtggttggcttatgctttcaagcactctaatagcagttcttggaattttgcttgtgactattgagggacctcatgaag

SEQ ID NO: 14348 - DNA, 512 bp, Gossypium hirsutum
atggaattaacatgataaaatatataaaatattaaaggttaaatttgttattatacgaatcaaaagagtgccacatcaacattttatttggtgaccaaatacattttaatggtgaaaaaaatgacttagtcatattattttcataattttataatattttataattataaaattttgaatatttagaataatgaccaacttaatacatttttggtaaagttaacataaaagcataagggtaaactatttaaatagttactcaagttttttaatgagtttttattttagtcaccaattttttttgttaattttgtcactctcattaagtgaaattttagttctagtcacttcaccattaaaatgtatttagtcacaaaaagaattctgatatagtcttcttttaattagtataataataaatttagctcatactattttatatattctattaagttaattttatttttaaaatattcaatatattttaccctcaacgtttacccatgataaaa

SEQ ID NO: 14349 - DNA, 652 bp, Gossypium hirsutum
gacatgttgcacaaggactgcccctgtagtcattttttgtttatctcatcaatgatatcacaatacctatggtttggtatcgcaatatccttgtcagttttaacttgggggatcctttgggagttggatatcatgataccatgcttagatatcgtgatatcattgtgaagggcctcaatcctcttctatataacaccatctggggtatcacaacttctagcctttgatatagcgatacccatcttctagataatgtttttttctcacattcgggcctccaataactccctacaacactcgacgaaccattaggtccttgatggctcactttgttatttcaggtctcaaaattattataaagcacactatttcatttattgaggcaaagaacgaaatctagataaaaacatgacaaaatcatataaattgctcagaaacacacttattaagtgtaatagggagcttgatttgacacgtcaaatcatgatagatcagaaacaaccactcaacatcaactcataagattgtaactccttcatcatttgtgtaagcatcaagctcttattcccaaggttatatgaggcccaaatgtaacaccccaaacccggcctggacgttatggctggatcgggtgatgtcacatggtagtgtg

SEQ ID NO: 14350 - DNA, 621 bp, Gossypium hirsutum
ttgatgcaacttctgtgatataagcatacgacttacgcaaccctgtaaattaattttagttatttccttacgtttcaaattttaaggagccgatttcatgttagttctaaggggtaattctattcctgagcagtagttagattttaagggagtcaatttttatttgtaatatatgttttttatcgaaggagagctaggatttctgtaaaaatttgctctgaatacttgtatttcggcaaactgataaaggcatctgccttactcaaattcaattggagttggagtgtagttgggaagatcactagtcttatactgggagataagcagtttctgtcccataagcatgtttcattgtattaggaggctgcactgcttcaacaggtttagtttttctgatggcagtcagccccttctatactatgaaaagtctatatggttttgaatcaaatgtagttcatctagtttgtgatttgttgagggtgagatagtagcagaatgaatgacatgaatgtttctgtagtttggatcctttaagttaactacatcaatgatttttttgctgcttggtgaactatagggaagcattgtttttcatttagtttttactggagccatcctgca

SEQ ID NO: 14351 - DNA, 616 bp, Gossypium hirsutum
ttgcttaacttcaactataactcctagagtaaccagtttgttttgtttgatgcccccatcttctttctagtgagatgtcaaattagcctgcttgggaacctcagcaagtaatgctaactgtcttgcttcacaatcaagaagcattttagttagcagatcaagtgacaccagagttgttgatgcaaatacacgaatagattcgtaatccattgaaagtcctgccaaatttatgcttacttgctcttgatctgtcaccatactaccaattgcaatcaaactatcagacatacttctcaccttagacaagtattatttaaaaataagagcgcctttctttaaagaatataacgaatgacacatattgaaaatttgatgcttgacttcgcaccaaaccttctttggatagccatccaaacttcaaaactagtactagcctttgtgagatacacgaaaacatcatctgtggctgtagataatagccaagaagctaaaaatttatcctaatttttatgaagaagaaacgttggattttcaactatctgaccctcattgccaactacaaattgtgaaggaatattaactgtgcctaaaacatatccctcaaggtcatacactt

SEQ ID NO: 14352 - DNA, 649 bp, Gossypium hirsutum
tttcatgttcagtttgccttcaggttcgactagaccgttactttttttttaaaaaccaagttacacaacaagcttattctattgacatttagagttctcccttacaggactttcagtccggagaaacagttcgaagattgccgcaatgccatcacatgtttcacttgccttgtatagataagtggcttcttagtcatggttcttgtccattatgcagaagggatctatttttgtaaattatacgatgtatacgtagctatttatatattttatttataccgttggttcatgtaattgctaatcgaatgttttcctactttgtctctctaactattccacattcattgtgggattgaacattgtacttgatttaactcttttgtgtaaaagttccaatttgcagttccaaaacttcaacttacctatctggctatgttgacacctcttttctgcaaatgatggtatcggtattttagttcacaataggtttcatcttggatcgagtcctccattgttctgattgtattgagtctgcgaattgctgcttccatttatatgtgaaggtcgtaggcatatttttgcgtctaaccggtttagctaaaaattgtattgattctatcgttgctgtaagttcatcaaaggaatgcct

SEQ ID NO: 14353 - DNA, 530 bp, Gossypium hirsutum
gatagcttggaaggatctctctcttatatgtaagagcagagaactttggattatataaatattaaaatagtaaaaatttatattatattttaattattactttttcataatcatgctaatctataattcttaagtgcataaaacacaaaccgtccgacacattaattaaagtaggctccactttgtcaactctcaccttcttgattccttttgggaaaagcatcactgctcatctatgacctcatgcgttattattggaaaaagaaaaagtgggaaatgcatagagaaattgcttagaaacctttgctgttccctggaaatttgagctgtttttctttcttgttgcttatatacttattgtttctcgtttctttctggggtattaggtggtttgttttctggttttgaacaccaaactgagataccttttttcttgtcgtacgttgtcatgttgtcgttaccttcaacttcctcatctatttctaaaatgaaatattgtagagctgttatccaccgtagacattctagac

SEQ ID NO: 14354 - DNA, 520 bp, Gossypium hirsutum
ccatttattttatattttatgtcacaccaactatttcttttatttgggaaaattatattggtaattttttttatctaattatcaaaaattacaaatttccttctcttaattattaaaatttgtttgtttttttactagttgactaacataaaaatagaaatactaaaatctaacatagttaagtgacaaaaaagataaaattgaataattaagtgatcattttgtaacatttcataaatgattgaccaatatatatatagttgagtgactactaatgtagtttacccttttttttattttatgggaacttttgtattaaaagtttaattgtattttaccttttttatatataaattaatttttatatgttagattaaagagtaaattagttactttttgttaaaaccatcaatctctactattaggtaatgacatgttattgtttggttgcttgaattagcaccctatatgtgacataccaatgtcattgtcttgttatttcgtcaaacatgttagtgct

SEQ ID NO: 14355 - DNA, 665 bp, Gossypium hirsutum
cagtcataaggttgattgggaagggcagagacatctgtggcaaaatattccatattcatatctccaatgcctcagacattgagtttgtgttgtgtagcgacaagctctattaacttatacctctattaaaccccaaaaaaagtagtagattttttctccatacaatataataaatgagaaaaaattgtattaaacagtaatttcacatcatccctattcctttccaatgagataatgacaaatcaaatttgatttgtcatttacttattgaaatgaaataaggatgacatgaaatcacaatttcataccatctattctttataataactttattaaaagatgagaactaaaaagcccaattacaaccaaatttggggctttcaatcaaaagaaggcccaaaagagttgaattaatcctatagatccaaattcaaagcccattttccatttttcaatacaataaagggaaaaaaattagaaggttgcttgatcccaaatccatagcactatttttttcaaaagatcccacagccatctcataatctgagccgagtgtcggaggcctgaaaacgaaccctaaacgatgggtcagggaacaccgggcggtatgaataggcaaggtttcccaggggaccggaaacccgatggctctgataagaaggata

SEQ ID NO: 14356 - DNA, 553 bp, Gossypium hirsutum
acttgcattccttgcactctcttcactttctcttccaactcattctcttgctccatttgaatcgccgccgcagccgccgcatcatcacactcaatcaccgccgttgattgcttttcatctttctgcttccgtactgccatcacaaaacagagtagtgaaccgacgagaacaaagaacccagtagaaaaccctattatcaccgcagttctcctgtgcttctttgaactgggttcagccaactccatcccatgaacttgtgcactttgaacaagagtcacagtaggcggcggcgcaaataaggggggccttggatgacattctttgtgaataatctccccacaaagaccagggttccatgaaaaagaagagaaaccaaatcgtaacaaggttggggtcactgggatggcaccagtaagattgttgcctgaaatgttaaaggtttcaagggaagactggttgaatggaggaatggttccattaaagcggttccaatccagtcgtagatagtataatcgatctagagaagctaatgaggttggtatagagccagtga

SEQ ID NO: 14357 - DNA, 686 bp, Gossypium hirsutum
gatgatagattgacggattacccatttatacacttaatgtgtatcacccgagtatattttgatatttcaataggttcaacgggcataataccgatatgaaatatgaagattatatgatataagggctatatgttttacatgaattatgagttacatgatttacatgaattatatgagttacatggataatatgatacatgagatacttatataattagtatttggtggttatatgaatgttacatgactaacttatgaatggtgatgtgaataggcattatgaggaaataggttggattttaatttgttataatgcttattgtcatttggtaagtttaattctatattatgcatgcttactaagcttaatgcttactccgtttattcttccgtgttttatagatttggaagtttgctcgatttggataaaggcggagattattatcacactatccaggcgactttttggtacttttggaacttatggaaaatatgtaaatatggcatgtttaagctagtttataggttgtgtgaagtatgaccatcttatgttgatgatattgatgtgaatttggtatatgaatgagctatatgatatggcttgaattagtagtaatggttgttttgattgtatatatatgtgattccatatgatgagttttggcttataaaggatggaatggatg

SEQ ID NO: 14358 - DNA, 472 bp, Gossypium hirsutum
aaaaggaaaatataacgagggcagtagagaaagggaaaatcgcaaaatccccagattttctttccatccaaacacacctctttctctatgtctttggtttattatcttcactgtttcatttgtatctattataattattatcctaaaaaaatctctcttccctaattttctctcactttcctggaaaaaaataaagaacaacttctgtaatcgttctctaacaaaggtatgtttatcagttacatgtatctcatttaagctctagaattttacagggctttgactttgcttctttattttgctttagctattaaaaggatgatacctgttgtgaacgacgatgctgaatttgataaacgatcggataaaatcgaagagaaagctagggtttctaccgatgaagctattggtagccgtaatgaagacaatagattgagcttaggagtttctgatgaagaagctagggtttcca

SEQ ID NO: 14359 - DNA, 383 bp, Gossypium hirsutum
gtatgcataaactactctgaacaacaaaataacggttagtgactatatatgagatagaaataatttgaaaagtatgaacttccacctcttcactgaacacaccgccaactccagacaaaccaagaagcacatcaggtttgacctttttaacctggataaaattaattttacagcaattagttcttacatatgcaaattctgcactagcttcttttgttcttagcacaatttcatatacaccagcctggcacttttatggcagcccctcaagccctgccattggacttaccacttcaagtagagaagccccctctctaagtcccactatctgtcctggatccttagcaaatggagcagccgctggatcaagaatcttcatctaa

SEQ ID NO: 14360 - DNA, 669 bp, Gossypium hirsutum
  misc_feature (590)..(591): n is a, c, g, or t
  misc_feature (620)..(623): n is a, c, g, or t
  misc_feature (629)..(633): n is a, c, g, or t
  misc_feature (636)..(644): n is a, c, g, or t
  misc_feature (647)..(662): n is a, c, g, or t
ttaaatatttcttgttccaccctttaattcctcaatctactcaagcaattgaaataataacttatgagcagcactatcagctattatcaattaagttaatataatatatttactaaaaataggttgggttattaacgtggaacctcttattacttcagcaagtaaaatgctatcccaagcttctgcttttcccatccacattttctttaggcaggagtcttcatgatagaaataggttaattaattttcttattcttgttgaaatttttgaaattttagaaaaaaggggaatgtttaatttttactaccaaacagtgcaatattgtcttttattcaatttattttgcacacgagattctattctcaaaaaaatagatagcttacatacctttgtgcaggaatgctcattcttttttttttgggggggccatataaaacctattttatcctttaaaaagaaataaaacgggaatatagaacttgtatgcttgctggcccaaggggtaaaatgggttttattggacccccccaaaaaaaagagagtgagtttttgtgcacaggggtgtgtgagctatatttttttgtgagtnnagtatcgtgtgtgaaatatattttgtatnnnngattannnnnaannnnnnnnnaannnnnnnnnnnnnnnnatactaa

SEQ ID NO: 14361 - DNA, 524 bp, Gossypium hirsutum
tttctctatctcaaagataaatattttattaaaatatatttttataaataatttttttaaaataaattttttataattaattttactttagcatctgtacaaattttttattttaatacttgaagtttttaatcattctcattttggtccttgaatttaaatttgataaaagtgagatgattataaaatataatttttatattttatgtatattttaaatgataacagttaaataatatcacattttttcggaatctaaaattaaacaataaaataaacctagttgccggaaattaagcatttagtttgatgtccaaacctaagacggatgagatcccgtcgtatcccaaacttcttgcagcaaccttttattccgtcaccaaaccagggaaaactccgcagcgtcagatctgcccaatcagcacataacacgtgtcaagccaagtcattcatatgctgtaagacaccataacatttcccaaaccaagtcaacgtctttcctccaagagaacaaggaaaacaat

SEQ ID NO: 14362 - DNA, 499 bp, Gossypium hirsutum
cgctgatagaggagaaccagaatttaaggagagagaaggtggaattgcagacccaaatagctcaattcaaagatctgcagatcaagctgttggattgcattgctcaacacactggaactagtgatcataaagaaactaggctctgctagttagctaggttgattttgttattttctttcgttttccattgtagccaaaagggtttaaatggtttgtttggtgcttgagaaaatgaacgaaaatgaaaaaatgaaaagaaaaaagagttttcattttagctttatatatggtcatggaacttatggattaacctttgctttcatcacttcattttgtgatttaacacaggccatttgccaaaatgatctgaagtgttcgtgggataatatactatttggtacctaagtttgattgtaatgttcaatttgatacttaagttaatttttttcaatttggtactcaagtttgacttcaatgtttaagttggtacccagaccga

SEQ ID NO: 14363 - DNA, 561 bp, Gossypium hirsutum
taaccatatttgttttttttataaaatgcctaaaactattcataattccttttatctagataatatatttcaacatactcaaacctgcatcatcctatgttggtaacaatactcacaccaatcgaattaagattcaatcaatgaaaaataatgttacttagaccctcattaattatcaacattataatcatttatcatattttaacatagatcataattattaatagtagtatttttaatgttgattgacctttaattcagttggtattaataattttacagcaagtaaaaaatatgaatttgagtatattaaaatatatattattttctattttaaagatttgagatgagtgtattaataataataataaattgtataaaaaagaaataatagcatttttaatacatacttaaactaatgaaagaatctcatggttgtattcttgaaagggttaatatatagtttaaccctaacttatccaaaagtacttagtacctaattttttttgttttgtatctaattagtacttaaatttgtattatgtcacacacattgtccca

SEQ ID NO: 14364 - DNA, 687 bp, Gossypium hirsutum
tttccatagttgtgcttggtaggaaggatggaaaaatggaaagaaaaagtaagtttctttccattcattgcttggtagagttgaaaaatgaaaggaaagaaaataaaatatttgaaaaatgtgtaactttaaattaacattcgcatctctcattgtcccttctctcatcattccaatttgaaatgactgttttttgtgcattaggattaaaaatgataatctctcctattttttttcctctcacttttcttccctaccaagcacactcaaaatttattttcttcacttttccacccaccaagcacaccctcatgagcaaccatccaacaaaaggaagatccacagattctaatcttccagcatagtttacactgtaagactctaggatctatttttaggatcagcatacaacacataattgcaaagacaatctggtctacttttagaaacttaagaaggttatagaagaaaaactaacaacagttctataaggtaggtgtctgaaaggcagctctttagtaaatacttgaaagcatgtaacagcattgcagcactttaaggagcacaagctaaacaatccttacctgagtaggaataaaaaagtcacggacattaatcttatagtgatccgtattggcatcacttccatttttatctttgctcagactgaactcaaccctatgctcc

SEQ ID NO: 14365 - DNA, 639 bp, Gossypium hirsutum
gcttcttttagccattgtgctttatatgggcttcatcatcagtctcataaatttcttcttttcttttaggccctgataaataattttatatttaggaatcttttttagcttttaaatatgttactaaatacataaacaaataattaatgcattaaccttggtattacaaagtttagtctcattgacctaaatgaatgtacgaatccacacgtgaaattagggcatcagtgggcgggtttcacgggtcccatcccgcttcacacttaattgggtagcgattgatacaagtttcgtaggtggttgagagaggatggggacaaaagttagacccttcgtgggtggtgaggcaggtgtgggtatgatcttgtactcgtctcatccccacatgccgcgcataatgtaataagcatatttaacaaataaacatttataaaattttaattttgataacagtactcaaatcacgttcattgttaatttttttagaataaaataacaaggagagcacataacagtttttcacccaattttaacacacctcactccttcagtttttcactttctctattttacaaaaaaaccctaaatttacttactattgttccacgccgcaacttgcaaacttgaagctcctgttta

SEQ ID NO: 14366 - DNA, 594 bp, Gossypium hirsutum
  misc_feature (541)..(543): n is a, c, g, or t
  misc_feature (566)..(566): n is a, c, g, or t
  misc_feature (577)..(577): n is a, c, g, or t
aaatcagatatggaaatcaaaattcattggtccaattatatgctaaccgtaacccaatagccgtgataaatcaaaaggataaaacaactcaataaatttccacggctactactaatttacaaaatttggctcacacaacttcttctctgtaaaataagcttatatttacatttccctcttgaaaataactattgggaaaaacattggaaaaaattattactgaatggtataatacattggaatccatgaaatggcaacaagtatgaacaattttattttattaaaaaaaattggttgcaacatgggaaagaaaaattgggcactaatcaacaagaactaacaacaaaatgaaaaatccaaaatatatattgaaaaagaaaagaaataacgtatacattacatttttctataccctatacaatcaaatcacccaatttgcaaacatattacctccctaaaaaaataacgacacaactttaaaaaaaaaacaaccataacaaaagtaataaagtaaaataaacaacaaacctttttctcctcnnntgtttccctttctcaaaatattnccgtcaatcanaaagtccatttccaaaa

SEQ ID NO: 14367 - DNA, 370 bp, Gossypium hirsutum
aaattggagggattatttactttttcttaagatttaagaaaattgataataattgaaaacaggaacacacaaactaatacgtcttttcaaaatatccttgtgtaattgcatatgcctcctaaataagtggatatcaccctgtatcagtcacatcagagcaagctccaaggcggggctcattctgatcaagaggtccaagcagtcttccctgaaaactgttttgggatctctagtctctaacatttccggaaacagatatggcaccgccttagttggcaaaggtcagtaaacaaattattgcaacctcacatggtaatcaaggttcctgtcttgcatgtaagacacaatgcgactataaacctcacataaa

SEQ ID NO: 14368 - DNA, 641 bp, Gossypium hirsutum
agcctgaaacaataagatcagcattagtactcgtgtgcgaacccatatttgagacatatttggacacgagtatactcatatccgacacccacactccaagatgcagttttcatagaattctgtacctgttatacagagcaggatcccaccaagtgacatccaaccacccttttgggtcttcttcaagaacttgtacatgtaaaacggggacagagcttggtaaaccttggggttccaatagaagatattgtaaaccccaatggcactgatgcataaaagccatgttatcaccactggtgcaaataagaaccctactcgatgtgtcccataatgttggagcgcaaacaagaatatgagaatggcacaagctgctgggacttcaacatctgcagaatgatataaactctgaggaaacagaatattaaagcacataagcagtgttttgagtttgagcttttgaaataaattacattaaccatatatgatgctgttaaattgatggacaatttagataccatctcatctatcttatccgatgttattccaactcgagtggtgataacatgggttaagatagatgagatggtatctaaattgtctatcaatttaacagcatcatatatggttaatgtaaattattt

SEQ ID NO: 14369 - DNA, 410 bp, Gossypium hirsutum
gatggatgagagaagtgaatcaatattccgcataaggtcaaaatatagggtttgtatgtattggggttggttgtagggacatgagcaaaagcatgactagggaggtcaagtgatgtctgaggatgaaagcaaaatgaagagagggaaaaagctacaaaacaaatttattacgtcttatgagttaaccaatcttagactagcattattacatatcaagaatactaaaaatgtgtagttttcaatttcaaatgaagttatgcaaacaaaatatcccccttttcttttctgtttttcttctaacggatttccaatattttatttatatatatttcgaattttattttagattaacttagaaaaccctattcaaattttactattaggcccagtactttgtgtaaattgaaatg

SEQ ID NO: 14370 - DNA, 420 bp, Gossypium hirsutum
tcggagctacaggataccttgttcttgtttttgtttggatgaatgttcaaattctaaattctaagaggtgaaattagtttttgagtccctgtaattcatagttggctcttttgtcttgctgtacaggtaccgtgtctctttgttttcacgatggaagcagagaggaatgtatgccacatgcatgtgggttgtgcaattgctattggttcttagcaaactggattcagtgtttatatacatccccgaattttaccttgaagctctggtaaaacaagtcttcctttaacaatgttatgtgctttgtttccaatctattccaatttaaatcaagataggacaatcactgctatactactatcaagtaattttaatttttaacttgcaatttaaattgtgttggttgcatattgcttggaaacc

SEQ ID NO: 14371 - DNA, 611 bp, Gossypium hirsutum
attcattggaccttcctttacctggtaaagaggcaatacgtatgaaaggttggattgagcgcttgccaatgacacttggatatcatatttttcgcactgtcttgtatatcaccttttgcgcatcaaactagtttttgcgcatcaatccagatcacatgcccattctcctcaaaaccaatttggatatttttcgcactgtcttgtaggatgaacaaaacatgccaattttcctgatttggtcaagaataagtggagttatttaggtaatatggctgactctcttactgattttacctcacatgtcaaagaatgaaacaatcttgtctatggttttttaggtacttgcaaaagacagcttataagggcacttgcaaatatccaaaaggctatggatcgtttgccctgtagttggttagtcaataatcaaatggatgtttgggatgaattagaaaatgtgcttaaccatgaggaattactgtagaggcaaaaggcttagtgtgattagctctagcttgggaatcataacactaaggttttttatagtcgtactatttaaaggaggaaattcaatcgtatcatggctttactatcgttatggagagtggtgttct

SEQ ID NO: 14372 - DNA, 638 bp, Gossypium hirsutum
aaaaaaaaaaaccccccaataactcataatgaaaatcggctccaagaattgctaatactcaacacccaaaacagaaaatgaggaccatgcccctagccgaattctcaaagctagagttcccatacaactctcctattttcaaactttccttaatttcctcctaacaacctagataatctccacaaatccctcctcaaacttctccatgactaattcaaattccacattgtagagtttgagtcaaactccactactcatgcaacaaggatgtaaaataaatacttctttgcgcatcatgaaactcgaactcaagctcccttacagtcttaatcacgccactgccactgggccacccagcactcttgtgtcaaatcttaaccacaattatttaaaaggtctacaggccaaaatccaggttcctttaaaaaaaaccaaaataaattgcaaaagccaagacttgaactcaagctcccttacaaccttaatgacaccacaaccactagaccacaagcttccttatgtcgattacttaacacaataatttaaaaggtctacttccaagcatccaaggttttattcacttaaaaccataatttttgctaaagcccaggtttgaacccaagatttctccaacactt

SEQ ID NO: 14373 - DNA, 515 bp, Gossypium hirsutum
  misc_feature (390)..(392): n is a, c, g, or t
tgttgtcaaaattttggaaggatcaacaaattggctcacactatccatcgtagttggtagcttttgcgtctcttagggtaatggcatgtatatgtggctagatgtgttgctttagtatactttgataaactatgttattaggtgctttaatttacttgtaaataggctctttttggtatacttaaaatggtatgaaaataagtatttgtagtatgttttggtatgtgtttgaactaggttactatgcatgaaatgaaacaatattgatatgttttgaaagtttatgttttgatataattgtggtgtctctgaatgacacattggttagatgaattaagttgttgaaatagcattttggtgcaagttgaaaggatgcttaattaaagcaannnggcagtgttttgagtttgagcttttgaaataaattacattaaccatatatgatgctgttaaattgatggacaatttagataccatctcatctatcttatccgatgttattccaactcggagtg

SEQ ID NO: 14374 - DNA, 415 bp, Gossypium hirsutum
cttctgctagatcatcacttcctaattgcgaataccacgtcattttgtctcctggactcgccagcctctgactcagaaagccaatgaaccgactgtgcaaccttcctaaaatgtacaaagcggtcgttccttgcacaagttgaaaagatcgccaattaagggacatggacggaagcgtcagccccgtaatgcggagaagcgatgaataccctgttgagaaggctaagcgcggattctaaacctcatgaacctttttggaaaatttcgacaaccttctgctagattaaatttagcggctaataatttttggggaaaaacaaaaataatggaaagggaatttttattaaaagaaaatatagaaagaacaaaaagattaaatttatggggagaaagtgtttacagccaaagatggtca

SEQ ID NO: 14375 - DNA, 417 bp, Gossypium hirsutum
ttaaattatttttcttttattatttgctataaaggcacacacaaaaataaaaatggggggatggagtgtaaagagatacgaaatacagagactaaatacatagtgaggaataaaataaaaaaacagaaggtgaatcaccaatgttaatttctttttttgttttatttgcttttctacaattatttttttttgttaacgtttacagatttgttaagaaaagaaacaaaaagcaaaagcttaccttagcagcgtcgtagaaccctcgtcaccccgtcgcgattggaggttgaaggagggttggggctgaacggcagcacccaaggttagagaaaccctaagggcacgtttggttcgctgtaatggaatagaggcgtaatagtaattcaattgtttggttgaatggaatggaataaagga

SEQ ID NO: 14376 - DNA, 574 bp, Gossypium hirsutum
tttgggtaacacttaagtcacaggttaattcaataaaaaagacttaaatttgaaattaaataagatttaaatttcattttgtatatttgagtttaagtttttattatttcattaatcaaattaatgttatttactcatgaaatcagattcaacccaaaataataatattatacataatttaagcaaagtttcagaatattaaggaaaaatgtctgaatatgaaaaatataatttcaagagtgttttgagttttttttgaaggaaaaagaataagtgtatgaaaacgaagtcaaaagagcctaagaaattgacaaaagaaatgatttcaaagttgaatttaggtaattaaacccaaattatttatcattttattttttaacatcttatatttagtaattatattaattttatattttttcaagttgaatgggttaaactcaaaagaaaatgttttattctttcataaaattaaactcgagactagaggtattcaccggtcgggttagattcagtctaggcttaagtatgaaagtaatatactttatgtttatttaagcttagcccgaaattaggg

SEQ ID NO: 14377 - DNA, 598 bp, Gossypium hirsutum
tacagtatttcatggagggaagctctcaatgaattatgagaaagactcactgtctgagcttcatggcatggggcctttccatccttttccaactccccactttttctcaagtcctaacagacatttgaacatgtctgttgggaaggaaattactttcttatcccttcacttattcccttttctttaacattggagttgagttttgaaataagattactaaacttgctataggttatagcatttaacctaaaattttaatttaaattcgtatataaaaatgtacttaatataaatacattaatattttttaaaaaatttaaaaattgtacctatatttaaaaagttatttcgtgagattttaactcgattaagtgtatccgtttaaattaaaaaaactttaagactatctaaatactttggttgaaattatatatgaaaagcctaacatgatttcctaattaacaccttgagttttgcctttctcttgataagagtaagggcatgatgtgatacactttccctttgccctcaaaggaaacttatccttctttttagaaacatatggaccattgccttaaagcacaagtagtacactggg

SEQ ID NO: 14378 - DNA, 407 bp, Gossypium hirsutum
atcttgtctgacccaacgtgaacacatgaagaaagagctgaaaggaaagtgacatgatctggcctacagccatttgttatcattcttctaaacagagcaattccatcctccccgtgtccatgcatggcatatgctgttagcatagcattgtgggacaccaaatttgggtctaagattctattatatgctagtactgcatgatgtatactcccacatttggcatacatatccacaagtgctgcccctatgtagacgtcagcatcataaccacatcgaactgaatgtgcatgaacctgctttccccgctcgatggtggctgaccttgaacaagcaggtaaaactattccaatagtgtaaatgtcaggctttatatttgaaatctgcatttcagagaaacattgcatggc

SEQ ID NO: 14379 - DNA, 362 bp, Gossypium hirsutum
aagtagtggctgcggcgcgtcgaggcacttctttgacggtccccgtccgccggcctgccgccccgctctgaagaattcatgggcctaaggcgggcgagacaaaatgggcgggcactactaaccaagccaagcctagttctcgccgataagcgctggtagcttgcttccaagccttgccttatataatagttgtggccatggcccgaaggagccttaagcgcttgtacaatgctcaagtcaaggctctgggcaacgagtaggatggagccttgactttctattatattagtaaagcgtgccatatatattgagggaagggaaaaggggtctctttcctcgcccgattgtacaggtccatccca

SEQ ID NO: 14380 - DNA, 666 bp, Gossypium hirsutum
caatcagaaagcgctgagatatgatatattgtgatacatggaagatactactcaaattctaagagaaaatattgtcatgatccgtgtattatgtttcgactttaattattcatgggcaatacgaaccaagtgggaacatgtcggaactactccacgttttggttcgtggggttattctcacttttgctgccctcaacttcaacatctttgtatgtgatatagtgaaatgtgtagttggtggtttttttatagggaaccaccactataaataccaattagcataagggtccctaagcaccaaaaaacaaacaaataaaaaataatatttcatctactgcggtttttgagtgcttagaaaattttggcggtttttaatttttcgtatagttaaattcgatgtcctcgtcggtggtttgatgtgctcgacagtggtgtcacaacatttgaactttgacatttgattttgacaatggttaaagatatttatgtttaatcttttctgttgcaatatattataaatcgttatttatactaacacttcggttaattagaatgtgaatatgtgattatttagtgatcagcatataatttataagttaaagtcctttaaatttggagttgacttcttgccaacaaatttgggatggaattggcgtaagcatatct

SEQ ID NO: 14381 - DNA, 679 bp, Gossypium hirsutum
ggaatggcattaaactaacgtatgcttaggaagatacatcataaaattaattcctaatttccagggcttagcctttgatttggttactatttttaaatatggagatatccagaatctccattattattactattttgtttcatatttccattattatttagcgtatatttgttgcctaaattaagggattattcttattccttagaaatctattaagattttattttctttattctatttttaagggattcattgacatatttgttatcattctcccctataaattatatcaatctgataataagaacaagagttcctttcattttttttgttgcgagtgataatatctccattattatttagtgtatgtttgatcgtcaacatatttcttttcctacaaaaaccaaaaacaacacattgacttctaatggatccaatttcagcataaatgagaacttagtgtttagcctactaaaaccaaggtcaagattttgcaaagtcatctcataatttagataaaaatggcactggagagacaacatttaccaatgaacttgtttacttgcagaagaatagaggcagatcaaaactccccctaattttccttatctcgactctagttttcttgaacttagtgttcaaattgctaaatgaaagggtgttagaacttgaaccaaac

SEQ ID NO: 14382 - DNA, 623 bp, Gossypium hirsutum
gtctcaaccggtggttcgattggttgaactaggaaccggcagtctgactagttcgaccaccaatccaactcttataacactgcacaccacacaaagtgactgcatttcacagcatggagatattaataaactgatctcaggtctaatgttactcaagtcctaagcctgagaaaaattgattgacgggtataataaacaaacctttcttcagcaagttgtcgcttgtttcctttcttctcatgattaactccatttggcaagcccttaacatttaaggaaaataatttcatttgatatccaaggaaaacaggaaacaagaagcagaatagtcatcaaaagaggagaaactctgaccttgccctctttccacttgattggggtagcggtaattttggttccatcatcgaggaaggtaaaggtcttcgtaagtgttgtattttcaaagtatggattggaattgaagttctgaaaaattaaagccagtcaacaaatcatcagatacaacacttacgaagacctttaccttcctcgatgatggaaccaaaattaccgctaccccaatcaagtggaaagagggcaaggtcagagtttctcctcttttgatgactattctgcttcttgtt

SEQ ID NO: 14383 - DNA, 671 bp, Gossypium hirsutum
ccactattaaacacactgtgcaagtaatgattcaaacattgtctatcctaatccttgaataattgcagcgtcaccctagcacatttattatgaactctcgcccaaacaatctctcttactaaaaattgttgactaataactcaaaggtaaataaataataaaatacactcaaaaaatctcttttgtggttgactaatcacttaaaagagaataaataataaaagacactaaataaaaatttcttactatgaacatataagttctctttttaagtagactgctttcaaagaattacatcatttagatacagtttgtgaaatctctcaatcaagttctaactatcttcaatgcaaagtgagataaaatacatttaatttcaaacttgaactttttatcttcaagcctttttccattaaattatcttcaattttttgtattatctcccaagtttattttcaatttcatgtctcatgcttcatttaggattcttccaaagcttactgcctaattaccataatcaaaactctcttttattttggagtcttttaagtatgctgcactaagaagataactattccatttatattccacatttttattatttataagataactataaggataacaataaatataaattcaaaaactaccaactatagcaagcgaattga

SEQ ID NO: 14384 - DNA, 420 bp, Gossypium hirsutum
gtcagaaagctcctcacataagaaatgatctttgaccgagtcttgaatatttgacgaacctcaaggtttaacatcaaatcaagataacgttggcgataacgagtttcctagcatggaaaacaaaagccaatgagaaccaattcaattcagagcatcaaggattgacaatataaaacatttagaatgactaccacacacttgcatcatacagtttttgagtaatattagccaataagatgaaccaaaaaaaatggagagagaaaaaaaataacaaccggcatgaaggaaaagatcatctcctaaataaccatccccccctttatttatcatgatgaagtcagtaagtaaataatacctgatccttcatgatctatctttcgggatgtcctaggacttcctgggatctctagaaatccatac

SEQ ID NO: 14385 - DNA, 692 bp, Gossypium hirsutum
gacaagaagctcaaacacaaacaatttataatatcaagcgctaaaaaagtgtttatcatcggtaaaagtttcaaggaggattttgtattagaagttaattgcattttgccccctccactcaaaaaatgggcaaattagtcattttacattagatcaaagagcaaactgatccttctattaagaattccatctatttctattgttaaaacctagtccttgtacgtcataatgagctacacatggcacacaacatgtaactgtctagatattcagtcaaccactccagtttttaagagtagaattggataaattttttaatagaaaggacctactgttgatctgacaaagagggactagtttgcccctttttttagtaaatggtgcaaaatgcaatctaactcctaggtcctccttaatactttaacctttatcatccgacatacaatttgaatagaaaatatatttacaaatgataaacaaactagagcttctccttgatgaaatcctcacaaacaaataacagaaatttcgtagtttaaatcatatactatgctaaaatttaaaagctacaacaaagttagaatcaaattcaattaagaattagaatcaaattcaattaagaagcaatgaattataacacttaatatcttcaaagaaatctcatgaattcacaccaaactttgcaaacaagc

SEQ ID NO: 14386 - DNA, 667 bp, Gossypium hirsutum
taggtgcttgcatcctctctgtgggatacacacagtatctatattcaagtgaaaatacatttatattatcaagtaacctctctacaaacaacagtttcagataaaattcagcttccttcttttctatattgcattatattatcatctattgagaaaaaggaaaaataaaggacatacctataatcaccaggcaaaatcggtataatttttcttacaggccacatgatattatcttctatagcatcccgtattgtgctctgcatgggaaacaatataataataggttaatctccttaacatattagtaacactttccatctcccaaagttcaataatggctacttaccccagcgtatcactatgtgaatcatggacaccacagaaatcaattataacttgtatgcaaggcatatgcacatttaaagtttaacagaagttggattaatcatctcagtgctcaaaaaatgttgcaaaactagcaagtgaaatgccgaatcctaagttaacatacgcactttggactgtctatttgttatccttctatctatttgttatcctaaggaaggggcaaccaaattccgatctcctataagcttctcctataagctggatacaagttattacttttatttggttttataatacaggaacagatttgaccaatacg

SEQ ID NO: 14387 - DNA, 575 bp, Gossypium hirsutum
  misc_feature (483)..(484): n is a, c, g, or t
  misc_feature (547)..(547): n is a, c, g, or t
tcctataacagcctatatattatcccaactcaaactttctcaaagtttaacttgtgctatcatctaacacagtttctatagagaaaaaattttataaagaacctcagatattttctaatgctactgaaaggaaaattaaaaaaagaaaaaaaccatgcatatctcgaagcaagtaaacttccaataaataattcaaaacataaattacagtaactacgaaacagaagtatataaaataatggtaacaagtatttttttatatataaaagagaaatattcagtaaaatcacctttacggcaagcagccccaatgcaaaagcacttcctttttcaacctcgtgctcgaaaggcttcgggcttctgtcgcggccctcgcatggcggcgcttgcagatgtttcactagagccggaacagcaccaccttcaacgatcacattaacaacctcctctgccgaaaaaaaaaaaaaaaaaaaaaaaaaaaannttttgggtaatcccggaatttcaaaaaaaaaaaaaacccccccccaaaaaaaacccaaaaaanaaaaaaaaaaacaagtccggatttcgaa

SEQ ID NO: 14388 - DNA, 696 bp, Gossypium hirsutum
ctccttccgattcttctctgtttgaaggcattcaaaacctcataagctaaaagaacattatccatgatttgtcgacccagaacaaaagcattttgtgcctcattgatacaatcattcaacactttctcgaatcagtttaccactattttctagataattttataaagaaccaaatatagactaataggtcgaaaatgcgctaacatggtcggattcataatttttggaataagaacaatgtgagtacgattgatctctgataaagaagtgcctccattaagaatatctagacaaaaggaaccaacatcttggcctacaatatgccaatacttctaatagaacaaagcgagtatactattaagactcaaagctttagttggaccaatcttttttagcgcaacaagaatcttctcccattcatattttgatgataagatcctgttttgctcctccgttatacactgtctcatcccttctaaaatatgatccaagttgttagaaccttgagatgagaaatgatcaaagagataagtatttgctatatttaacatacctcattgcttcgttatagtccttccgtcctcaccttgtaaccccttaatctaattttttcgaggacgttgaaatgcaaatcgatgaaaaaatgtcgtattttagtcccctaatttcagccaattagctttctccatttgctcc

SEQ ID NO: 14389 - DNA, 641 bp, Gossypium hirsutum
tttcaccctatacatcagaatcacataacatgcatgatagaataggtacaatacagaatagtgacatgttttaacatacgatcagtaattcagtaacagtggcatgcttcacatgcaatcagtaaatacagaatagtaggcattttctcatgcattcgggaaacatgtgataacaataccatatcatacattagcagtctatgcatactcagccatagcagacaatcagtaattacaatcaacacttacacattcaattaatcccaaatagaggctttgcacattcggctatcgccttttagcacttaccataatcgacaatcccttatctaacacaaggctattcggctaagcacaaaaatcaacatgtacaattaaccaacatgcatatcacgtaatttacaattatcaccaaaacacccaaaggtaagacccacacttgattaacgcaaaactgaaactctattgctattctgcaactcctacgttttagatataactagatccaattcagatctgtacccaacacaaagaatgaactaaaattaagtccttaaccaccctgtagggttcgaccataacagaggaaagagagtggcttttcgaatctggttttggagatcaatgcttaccctatttgg

SEQ ID NO: 14390 - DNA, 789 bp, Gossypium hirsutum
  misc_feature (667)..(670): n is a, c, g, or t
  misc_feature (683)..(685): n is a, c, g, or t
  misc_feature (688)..(693): n is a, c, g, or t
  misc_feature (696)..(705): n is a, c, g, or t
  misc_feature (710)..(710): n is a, c, g, or t
  misc_feature (712)..(714): n is a, c, g, or t
  misc_feature (716)..(716): n is a, c, g, or t
  misc_feature (730)..(730): n is a, c, g, or t
  misc_feature (737)..(743): n is a, c, g, or t
  misc_feature (752)..(753): n is a, c, g, or t
  misc_feature (757)..(757): n is a, c, g, or t
  misc_feature (772)..(776): n is a, c, g, or t
  misc_feature (778)..(779): n is a, c, g, or t
  misc_feature (782)..(782): n is a, c, g, or t
  misc_feature (784)..(784): n is a, c, g, or t
  misc_feature (786)..(786): n is a, c, g, or t
aaatcgagaggcatgtggaggaattaatggggcttgcattagttccattattgtcagggtcttgtagtgttctgggccaatcatcaaaaaaatgtctcaaaatgtgaccatcagatctgtcatcgacctcattttgggcttcaaaaagacccttaggttcagttttggactctggggaactgccagacatcaaagaacgttttagtgcaaaaatcaagcaaaaagaacaaagcaatataacgtaaaaaaaagtagttggggttagcctgtgcagaacttaaataaaattggtcagattttgatcagggtcctaccatggacgtatcactaccaaaaaaatatcaacacagcccctacaaaagatactttggaatccaaagttccaccagtttcattaaatatgtaaaagaatccatatcaattcaaattcagatacagcttatttggaaagtgcttgaaaagttatacggtaaacccatacgtccaacatgcgcgtaacttcaacagtcaaaaggaacatagaaaaatcccaccctaccacaacacaatttttctttatttggctctacattttcaccattttaaaaaataagtcctttttttcaaatccagtttaaaaaaagtatcgattatggataaatttgtacatccctcatcatgattcacnnnnaaaacctccctcnnnttnnnnnnttnnnnnnnnnntttcntnnncntttttttctctttnttttccnnnnnnntttcttttnntttntttttttccctcccnnnnngnngcntncntct

SEQ ID NO: 14391 - DNA, 669 bp, Gossypium hirsutum
ccatctgctttgggcctttttagaattataagtgtgcagtttttataattttgttttattaataaaagcctaatataatgttattaaaaaaaaagaagtccaaataaatagcaaaaagcaatcaaagtctaaatatttaaaactctaaaaatcataaaaaatgactttttataattataattataattcctatattttataataagttgtacgaattttaaaaaaattcacgaccgtgatacccgcagtaatcgcaatagcgtccgttatgtctgcaaccgcgacaaacgcgacgcgaccgaaaatacgaccgcgaccgcaatttaaatccctgtgccacaccgtgctgcttcatgtaaagcggtgttggattcctgatccctaatcctcagcatctccctcgctgcatttactcaatccattcccagcttctctaaatctccatctctagcttttgcgcaagacttattagaagtttcacaatagcagaatgcccataccttgctgcaaggtgcgaaggagtttgacctttagcattcgtttggagtagcagtgacggacacttgctgagaatttgttccataaaatctgatctcgtttctctttttatcataggaatggaaaaactcgtaaacggtgagataacactatttatccggcacgtcaaaa

SEQ ID NO: 14392 - DNA, 696 bp, Gossypium hirsutum
  misc_feature (671)..(674): n is a, c, g, or t
  misc_feature (690)..(692): n is a, c, g, or t
agttctacctctccgttgctcagcctataacatttaggtgaaaaggaggaactaaataaacaaaaaaacattaaccataaaagattctttcaatacctgagacttagaaacccaaacaagctctgatgaatcctttcttcgagcagaatcccaaaagacttgtaaagaccggcatgaatcaataacaaatgccactttgggtattgtcacagatgattctgcaatatttgtcgccaatattacctgtgtaaaatatatatatatctttggaacattaataaccacaacacaagatataaaacttgaagaagaaaatcaccatgatggttgctattgatggaagcaaaaatttataaaaacttcatgcataacttacatcaaactaacaatgctatataactgcaaatgatcatattatttggacaacctgctcagtttaatcagaaagtcattcaagtttacatctagcatgctaaaagatgcatatgcataaagtcttgcacgttcaaccttaataatactcaggcagtcaaaactcataattagggttaaaaagtataccttacgatgagatttccagattttcatagccataagagcttgttcggtgtcaacactaccatgtaaaatgtgaaccttaaaggatgaactaaatggcttccaaagatatnnnntttttttattccggtnnngttg

SEQ ID NO: 14393 - DNA, 1225 bp, Gossypium hirsutum
  misc_feature (518)..(522): n is a, c, g, or t
  misc_feature (524)..(528): n is a, c, g, or t
  misc_feature (532)..(533): n is a, c, g, or t
  misc_feature (542)..(544): n is a, c, g, or t
  misc_feature (547)..(547): n is a, c, g, or t
  misc_feature (549)..(550): n is a, c, g, or t
  misc_feature (577)..(582): n is a, c, g, or t
  misc_feature (585)..(589): n is a, c, g, or t
  misc_feature (594)..(594): n is a, c, g, or t
  misc_feature (602)..(605): n is a, c, g, or t
  misc_feature (623)..(640): n is a, c, g, or t
  misc_feature (643)..(647): n is a, c, g, or t
  misc_feature (661)..(669): n is a, c, g, or t
  misc_feature (671)..(671): n is a, c, g, or t
  misc_feature (673)..(673): n is a, c, g, or t
  misc_feature (678)..(691): n is a, c, g, or t
  misc_feature (694)..(696): n is a, c, g, or t
  misc_feature (703)..(704): n is a, c, g, or t
  misc_feature (708)..(712): n is a, c, g, or t
  misc_feature (726)..(727): n is a, c, g, or t
  misc_feature (733)..(734): n is a, c, g, or t
  misc_feature (745)..(746): n is a, c, g, or t
  misc_feature (754)..(754): n is a, c, g, or t
  misc_feature (756)..(760): n is a, c, g, or t
  misc_feature (762)..(769): n is a, c, g, or t
  misc_feature (771)..(777): n is a, c, g, or t
  misc_feature (783)..(787): n is a, c, g, or t
  misc_feature (790)..(792): n is a, c, g, or t
  misc_feature (802)..(804): n is a, c, g, or t
  misc_feature (806)..(810): n is a, c, g, or t
  misc_feature (824)..(829): n is a, c, g, or t
  misc_feature (842)..(848): n is a, c, g, or t
  misc_feature (854)..(856): n is a, c, g, or t
  misc_feature (877)..(885): n is a, c, g, or t
  misc_feature (898)..(900): n is a, c, g, or t
  misc_feature (902)..(903): n is a, c, g, or t
  misc_feature (905)..(905): n is a, c, g, or t
  misc_feature (907)..(908): n is a, c, g, or t
  misc_feature (911)..(913): n is a, c, g, or t
  misc_feature (915)..(920): n is a, c, g, or t
  misc_feature (924)..(929): n is a, c, g, or t
  misc_feature (945)..(945): n is a, c, g, or t
  misc_feature (947)..(947): n is a, c, g, or t
  misc_feature (949)..(951): n is a, c, g, or t
  misc_feature (953)..(954): n is a, c, g, or t
  misc_feature (968)..(970): n is a, c, g, or t
  misc_feature (972)..(972): n is a, c, g, or t
  misc_feature (983)..(988): n is a, c, g, or t
  misc_feature (990)..(991): n is a, c, g, or t
  misc_feature (995)..(996): n is a, c, g, or t
  misc_feature (1003)..(1007): n is a, c, g, or t
  misc_feature (1010)..(1012): n is a, c, g, or t
  misc_feature (1015)..(1015): n is a, c, g, or t
  misc_feature (1031)..(1034): n is a, c, g, or t
  misc_feature (1044)..(1047): n is a, c, g, or t
  misc_feature (1051)..(1051): n is a, c, g, or t
  misc_feature (1053)..(1054): n is a, c, g, or t
  misc_feature (1056)..(1056): n is a, c, g, or t
  misc_feature (1063)..(1063): n is a, c, g, or t
  misc_feature (1065)..(1066): n is a, c, g, or t
  misc_feature (1068)..(1069): n is a, c, g, or t
  misc_feature (1071)..(1071): n is a, c, g, or t
  misc_feature (1073)..(1074): n is a, c, g, or t
  misc_feature (1077)..(1078): n is a, c, g, or t
  misc_feature (1082)..(1090): n is a, c, g, or t
  misc_feature (1094)..(1100): n is a, c, g, or t
  misc_feature (1105)..(1106): n is a, c, g, or t
  misc_feature (1113)..(1113): n is a, c, g, or t
  misc_feature (1116)..(1119): n is a, c, g, or t
  misc_feature (1130)..(1133): n is a, c, g, or t
  misc_feature (1135)..(1140): n is a, c, g, or t
  misc_feature (1142)..(1144): n is a, c, g, or t
  misc_feature (1146)..(1150): n is a, c, g, or t
  misc_feature (1156)..(1162): n is a, c, g, or t
  misc_feature (1164)..(1166): n is a, c, g, or t
  misc_feature (1175)..(1178): n is a, c, g, or t
  misc_feature (1180)..(1182): n is a, c, g, or t
  misc_feature (1202)..(1206): n is a, c, g, or t
  misc_feature (1208)..(1210): n is a, c, g, or t
  misc_feature (1217)..(1221): n is a, c, g, or t
tgtttctttgacttgaagtttaccaaaaaaattataccactttaactatatattaaaagaatttgattcacgatttgtttaaattttttataaatgagaatgagaataaaattgtttgagattgaatttaacctttaatatttacaatataatgtttttgttacttggtctagaggttgctgacaaaatgacttatttaattaaatatcattttgcttagcaatgcaagttcattttcatttaaaaaaggaaatattttctcttgatattataccacatcttgaacatgaaagttagtgaaaattaaacttgtttaattaaatcaattatatatataagaaaagaaagaaaggcaaaagtgatgaataaaaaaacttcaatggagcattggggataataaaagaaatatatatcttaaagcaaggttaattttgtaataataaacactagttaacccattggagcatttaccttcgttgcatttgataaaactcacctcactggtgaaattcgagatnnnnntnnnnncccnntttcccccnnnttntnncccccccccccctccctttttttcccnnnnnnctnnnnntcctnctccttcnnnncctttccccctttttttnnnnnnnnnnnnnnnnnntcnnnnntttttcctcccccnnnnnnnnncnanccccnnnnnnnnnnnnnnctnnnttccttnntttnnnnntttcttcccccccnncctttnnctttttttctnntcccctcncnnnnntnnnnnnnntnnnnnnntttttnnnnntcnnncccccccccnnncnnnnntccccccccccccnnnnnnctttttccccccnnnnnnncttttnnnttttttcctccttcttccccnnnnnnnnnctctttcttttcnnncnncntnnccnnntnnnnnncccnnnnnncccccccccccccttntncnnncnnctttttttttcctnnntnccccccccccnnnnnncnncttnnttctccnnnnnttnnnccnctttctttctcctctnnnnttttttcttnnnncccncnntntccttcncnntnntntnnctnncttnnnnnnnnnttcnnnnnnnttctnntttcttnctnnnntttcttttccnnnntnnnnnntnnntnnnnntacccnnnnnnncnnnttcctcccnnnntnnntttctttttttccttttctnnnnncnnntctcccnnnnntccc

SEQ ID NO: 14394 - DNA, 363 bp, Gossypium hirsutum
tccaaatctgccaggcgaggccccccaccacactgaatgatgaactttgcgcctacaggagggccaagccagaatggaattcatatctccttcgtctggtcgagaagggactgtgactattctattacattacggagaagtccattttcgtgatgatcgatccacgtcctacccgggcttagaaagctagctttctaaggcgaaggacttttattgcacgagctagccagccaatccagccgttttcttgcttccatccgcctatctgatcttttgaacaggccttcagcttcaatcaaataggccatagatatagatcgagattcactcataagacaagcgactaccaacatggataaggta

SEQ ID NO: 14395 - DNA, 621 bp, Gossypium hirsutum
ttcttttttttagtttaatgagaaaaatggataaatatcttaaattagaaagtaaattaatattttttgttaaaaatttatccatccttattattaaaaacaggtttgtatatgtcaacatgaggttacatgtaactgtttaattattttgtcaattacgtcaatttttattagtagaaatagatgaaattttaacaaaaatatcaatttactctttaatttaatatatatattaatttacttatattttgagtaaatgtgacagaatataatctaactcctaatatagcgatatattaaaattttatgactaacttttatatctgaatgtggtaaattaacttattttagcagttaaaattattccatatccttacttgaaattgaataatttcaaaataccacctcaacgtatttaatatcaagatcagtgtattgaatattcttttacaagctaatggtatccaagtattaaaatatatcattaatttgtaaaaaggttaaaaaaaatttgtgttttctgaaatttaggagtttattttttagactttattttatgaaatttaatgttttctattttttagattttaaaatttaagttcaaccgttagcgctacaatt

SEQ ID NO: 14396 - DNA, 362 bp, Gossypium hirsutum
agactccgttggttcctacttgttctactgactttggaagtcttagaattaacactaatcatggaactcgttgcatagaccggcgtgagattcgaaaagatggttccaagagagaagcttcattgccaagcaatcaaagattccgtgttaagaaatctcgatgtccaattagtagttgcagtaataacagggaaaataatgatacttcactagttagtcttttcaccccatatcaattactgcaaaattcagacggtgataatcaatctgaagacaaccttatggtttcaggggcatctgcttgtactaccaggaattcaacttcagttcttgaaaatgcagtggatgccaataatcagata

SEQ ID NO: 14397 - DNA, 515 bp, Gossypium hirsutum
tagtttgattgtgacttgtgaagatattttatatttaaagagggtgaagagtaagaataatatgggagacatccatttatatggataagtggtgtaaaatttatcataactttttatacatttaatatttttcatttgatttattattattattttgttgaggcctacctaccaacttttatccattgtcctccccaagcaacggttatgattcacttttagcccttgcttggattatatgcatgcaagcaatgcccattcttccactctaattaattttatttaatttactacactatttatataattaattttatgctctatggtgttaaaattttatttaatttactacactagtatttagtaaatctaaatcaatggatagaataaaaaactgattgatttgattacttggatttagtttgtgaagaagacaaagtaaaataataattataagaaagtaaatgacatttgttgtgtgaccgaaattcttcacaagaatatttgagaccctc

SEQ ID NO: 14398 - DNA, 620 bp, Gossypium hirsutum
aagcttccgaaccagtgaatgcggaggagtggctttcagttaaggtaaatttaatattaatttcttgcacgcatactgtttaatgtttgattccgatttgcattttgcgaaattattgatgcattctccgaagattttttttgtctttttctcgttagtcttaaaaaattctactaacttattatgaaaaaactaaaaataaattataaaaatagtcacttttatttatcttaaattatattttaataacttatatttaaaatattacgttttggtcacttacattattattttattacaaaatggtcattctaccgttaagtttcgttatctccctaacgacagtcctacatggcaatctaaatttaatttatttaattaaaaaatttattttcatcttagtaagtagacatccaagttggcatttaaaactcattttaattgccatgtaggactgccttaaggaggtaacggagtttaacaatagagtgaccacttcgtaacaaaatgataacgtaagtaactaaaacgtaacgtttcaaacataaataattaaaatataatctgaaacaaagaaaagtaactattttttaactaaattatgctgtcactgcacacct

SEQ ID NO: 14399 - DNA, 433 bp, Gossypium hirsutum
gttatcgagtcgagtcaattcaaatagtaataaatttgatgtcttttgagtaaaattttgagttcaaacattatagacgaaaaggcaatattaaaaaggtattatctttcgtttagatgtttaatccaacttgattaaactaaatttagtgaattttatgtttgtccagattcgatttacactcatttatattattttttaatatatatattttttaatttaatattcttaaatgattttttaaaattttacatttagtcaacttaatatattcttccatgtttacgtagtattatattattatatatttaatttaatataatataaattacataatatataaaaataaaataaaaataaattacaagagaataaatcgagctaggttaaatttgggccaggccaagctcgggtttaaatatgaagtctaaac

SEQ ID NO: 14400 - DNA, 516 bp, Gossypium hirsutum
ggggcggaaggtctgttgccaatgccatgcaccattttatctgtccctttgtgtttctggagtgacaaagggagaggacgatactagctccatatttcaacgctttacagtcttgaaaattgtgtgaagagtgatatacaggtagagagaaagttggaaagaaacaacacgttcatgtccaatcctgcatctctccaaaaactcacaattaaaatagtaaataaattcagctactttttcaggttttcttttctcccttacaggccttagcttaggtttgaactcttctccatatgcatggtcacgtgctttctttttctctttccaaaaaaggcagatttgaaaatggaggtaaagtttatcacaagtttagcaactccaagtgaactcggtgtctgaatggagaaaaagggaaatagtctactccattaagcacgaccaaagtactaagggagtgcttccatgggttgtatttgttgattgtagaatattccacagtccacactcactatagga

SEQ ID NO: 14401 - DNA, 570 bp, Gossypium hirsutum
ttcccttacctatggctcctaagtgtgtatggattgtatgttatttcgagtcagatcgttaacataacaaaaaattgagatctataattatcaaagcttgtaagtactgtactcgattttatacttaatgtactggtatttcttgtaattttttttatgtattttcctattgaatcaaatatttccttgccttgtttgtttccagaaaagccaaaagaaaaaaagaaaaacaaacgtgtaatacttaaatcactggataaagattggattagagagttaagaatgaagcgatcagcatcaaaagatatagtacaaaatattagtaataatcaacgtagaaaaatgaaatctcactgatcaaaatgaaaataaacataaaatcatggcgattcgagtttaaggaattaaactcaatatttcatcattatccaatcatataacgtcactaaaagagaaccttaaacagcttacctagttcagttccagcctccaaaatctgaagagagaaccaatccagtaattaactgaaaatattgttttaaatctggatcagaaagagagtgatttgag

SEQ ID NO: 14402 - DNA, 605 bp, Gossypium hirsutum
ttagaggtccgaatccgatttcacctgagattattaaggtaaattgatggaaaatttaatggtttaactttttttttctctcaataattatgtccaatatataaaacataaacatcttttaaggaaaagataaaagtattcgtgggtcgaccaatttaattcaagtctactcgtattagtaaatatttaatccaaatttgtttaagcttatcaacattagggatgagttgagtttaatttgttcgtttttcttaaatcgttcatcataattcaattcgattatcgatttatcatcatttagatttttaaatttattttgacaaaatgagttttattttttatcttttgaatactatttgataaaatttcaacttctttataaatatttctagaaaaattattttttcaagtaaataaaaaataacaataacttttatatggtaatttcaaaaaatatttctatataaaacttttaagtgacattcactattatataaaaattaaaattaattataaattaaacaaaaagtagtattcggctcagttcgggtaaccatggtattttaacttgtattctattatctaaacatctcgatctggatcaa

SEQ ID NO: 14403 - DNA, 398 bp, Gossypium hirsutum
ttttcgtacttcacgttccctattcacttctgaaacagaaatacttgttgaatcctagaaattatctttaaggacagtggtatacaagcctcttggagctcctttagctaaacctacaatcctattgaaagattgcagtatcttcttcactactagcttagaaaggataaaaagctagcactagtaatttttcaggctaaagattactacttggatcaactatagcctacctatgtatgagaggagctttgttgcccaacaagtgatcttgaaaatccttcactaaaagtctcattgtgatcaatgatataccaagctactgcactaaaaaggttccaagttgaaaagcttcttgaatggattgcatctttgcctaccaatctcactggcttagatat

SEQ ID NO: 14404 - DNA, 452 bp, Gossypium hirsutum
tacccgatcgagtgattgagattacagatcccattcttcttcaagagagggtcagaagaggaatagtcagaaacatcactctaaatgaggtcaacttggaaaatgacagacgtctccattgcttgaatttgatattcaaaatagggcttacttgttctgttgaatcgcggagtgagcggatggacatgagcgatgttgttatccagctttgttgtattagggataaacttttccgtccaattcaattacatcgtgggattcgaacttcatacactacttaatcaaataatgtcttcttgtcttagcaccccaaattggtttatatttcgttaaaataattatttatactaaagtactggttcaattttcacattttagtttattattttcgttattttttaaaccccttaatttttctggtagcactgtaaaagccttgggtgtggcatagt

SEQ ID NO: 14405 - DNA, 628 bp, Gossypium hirsutum
  misc_feature (54)..(54): n is a, c, g, or t
  misc_feature (56)..(59): n is a, c, g, or t
ttatcatgggtgggaatcaaattcttatataaaacatagttaacatttctcagncnnnnccttcatcttttgtgcaaacaaattttaaattaacagaactcaactagtcgaaatcacaagccattcaaaaaacaatagaatcagacaaacatgtaatagaataaaaattttcatctgttcaatctgttcaatcgaacaaacattgaaaacattgaaagaattttcatctgttcaatcgaacatgcaatacaaagaaaagctgaatggaaaacgctagaaacgaatcaaaattaggagaacaaaaacaaatattccagatttgagcaaaagcaaaactaaatcgattttacagaaaagagaagaaaagaaaaacagggaaagagtgtgagaatttttcgttgttgataaaatggagaaaagaaaaaaaacgagagaagaaaagaaatgtacgagaataaaagaagcagaaatcgatggaagggaaaaaattaccttgcaaaacgtcggagaggatgagcgcagaaaacgaaaaagatggtaacaaattgggagggaatccctattccgcgcttaaacatcagaatggctattacagccaacgtgggtaatagaatgcggaaacggaatc

SEQ ID NO: 14406 - DNA, 372 bp, Gossypium hirsutum
tactgaaaatatttggatcgtcctccttgatctccagtcctgcttgaataattcattttctataatcctgttcaaacaaatatatatatataaaacaaagattggtagctaagacaaattattcaacaacaatttaaacataactaatccataaaaaagtagtaaaattacatattttttaagaatgttaatgtctggagtagtagcaatcaataccaatacataaacacacacacacgattgaacaagtagcaaagacaacaagatcatagttgatcttttcatcacggtacttgaggctgctataaatcaaagcatgtcactcttttgcaacaaattgcatcactattagcattgctgaccgttgattac

SEQ ID NO: 14407 - DNA, 496 bp, Gossypium hirsutum
  misc_feature (27)..(29): n is a, c, g, or t
  misc_feature (56)..(56): n is a, c, g, or t
tgccgttaacagcttagagacgtattnnnaaggtcttcacaagcttgtcaatgccntttctcttggctagaaagatcacaagcttgtctactgtgtcattcattgttgaggtggtggtgagggtaaagcttttttgggtgttgttgataatgatgaacctagtgaacaccttatttgatttcttgacatgtttaaggagagtgagagccacaggaattttttggtttcggggataatactatgagggatttgccttgtggttttaagctcctcacactcacagccagtggtttacttgtttttttctgtcttattatatcaacagcaatttggggtgccatgtggacttatttcttcttcatacagtaacacatcttatctaccacatatataggataagctattttgtatttgcccaaaagacagccgtgaaacacactgactgtgcttcatcatggttggggtcactgttataaatccacctacacatacgacc

SEQ ID NO: 14408 - DNA, 655 bp, Gossypium hirsutum
atgaaattggtcatgctagcccatcccccgaacccgaacccgatcactagaacccacaccacaataaaggcgtttaatgcatacattccagtccaacttggcatgaagaatggtggcttttctgcagcattctgtttcaccaaagaaaaaaaatagcaagtaaataaaaatcctagtaatatacagggactacaaccacaatttcaccaattcgtctttatacctgccgagcagaggcttttctataggtgagcatatgggctaaagctgggatgatatatacggtaaagctaaccaaaagagcgccgaccgccgagttgatggggccgaagaatgggaagatgatggccaagaaccatatcgggatcaccaccggcagccgtgccaatgccctcaaacaaatgcttttagtgtcatgcatccctattactttctcccacacgaagtacagcggtgtgcaagcaaacccaaatgttatgaactgcaataccccatttcatgatgtcacaatttgttaaattggtttgaaatacaggtttaattatactgtatcattctacttttataatgttatttgtagatccgaatggataacactcttaataggtgttgttaaagtgttaaaagtatccaacccgaccaactcaaatctaaa

SEQ ID NO: 14409 - DNA, 910 bp, Gossypium hirsutum
  misc_feature (776)..(776): n is a, c, g, or t
  misc_feature (778)..(778): n is a, c, g, or t
  misc_feature (787)..(790): n is a, c, g, or t
  misc_feature (806)..(811): n is a, c, g, or t
  misc_feature (817)..(817): n is a, c, g, or t
  misc_feature (824)..(829): n is a, c, g, or t
  misc_feature (831)..(833): n is a, c, g, or t
  misc_feature (836)..(841): n is a, c, g, or t
  misc_feature (843)..(853): n is a, c, g, or t
  misc_feature (855)..(861): n is a, c, g, or t
  misc_feature (867)..(872): n is a, c, g, or t
  misc_feature (875)..(880): n is a, c, g, or t
  misc_feature (882)..(889): n is a, c, g, or t
  misc_feature (894)..(895): n is a, c, g, or t
  misc_feature (898)..(906): n is a, c, g, or t
gtctgttctagccaaccaattaagaagttaaattcaaaatttgcatcaccatacatttttgtagaaacttttttgctttagtttgaatcatttctccaatcatgtttactttctcttgatattggagaaaccactcttacaatgcattctctaattcaggatatttggttgatctgttctagccaaccaattaagaagttaaattcaaaatttgcatcaccatacatttttgtagaaacttttttgctttagtttgaatcatttctccaatcatgtttactttctcttgatattggagaaaccactcttacaatgcattctctaattcaggatatttggttgatttgtgtattttaacattgatactcttatctcttttgacaaatatttagatgaccttgtaagagtatttgatattgttgattggctaaccgagagatctaatgtttgttgaacccactcttgcaaatcttgttgactagaagagggatgctcatttttgtactcacatattgcttttctcatctcattgatactcttattctcttttgacaaatatttagatgaccttgtaagagtatttgatattgttgattggctaaccgagagatcaaatgtttgttgaacccactcttgcaaatcttgttgactagaaaagggatgttcatttttgtactcacatattgcttttctcatctcattgatactctcatctcttttgacaaatatttaaatgaccttgtaagagtatttgatattgttgattggctaaccgnangatcaaatnnnngttgaaccccctcttnnnnnncttgtngactaannnnnngnnntannnnnnannnnnnnnnnnannnnnnncaccannnnnnatnnnnnnannnnnnnnaactnncannnnnnnnncccc

SEQ ID NO: 14410 - DNA, 659 bp, Gossypium hirsutum
ttgattggtgttaaatatgttgtaaactatagatttttccatgttgtatagtgggtattaaattttgggaagataaaccaaataataataataataataataacaacaacaataataataaataagcaccgcatggtcctaactcctatccatagtcatactcagttcaaacacgtctttgctctaagatggagagatggagaaagacatatatataaagataaaaaaaaaatagtaaattacatgcagccctaaaaacggaattcattgtaacacttaggtaaaattatcatggagtactttttattaggagttagattacattttaatctatttacacaaaaaataaacaaattagtccatgtacgttagatcaaagagtaaattgatctttctattgaaaatttcattcatttttactattaaaaactaatctctttacattagtatgaggtacacatggcacactacgtgtcacagtttgattatttttgtcagttatgctagtttttaatagtaaaaatagatgaaatttttaacaaaaatgactagtccgctctttgatctaatgtataaagattaatttgcctatttttttagtagaagaggtaaaatgcaatctgacacttaatacatacgcatccatggtatttctaccc

SEQ ID NO: 14411 - DNA, 364 bp, Gossypium hirsutum
  misc_feature (66)..(66): n is a, c, g, or t
gctagcgcttatataaaagtatacagggccactacccttattatccacttttgtctattaaacaangtttttcactagttataggtggtttcaacatttatgcttagggaaaatattctgtctttttcaatgtctttttgaatgtttgtttaaagtaaaataggatggtcaaggtaaaagatttttcagttaatgtgaaagtacctctttattcctgtaaaatattttatcaaatattttttcgtaagatatttttcaaactgctaagattatatccactgtaatatcctcatacttgacctgaacatcggatcaaaacattaagatgttacattctctactacattcttcacttatcaaatat

SEQ ID NO: 14412 - DNA, 616 bp, Gossypium hirsutum
  misc_feature (608)..(608): n is a, c, g, or t
gaggacgtgatcgagacaggaaagagcgtgatcgtgaaagtgagagggatagagaaagggaaagggagagagagcggtcaaggagaagcaggagccgatcagaaagagaaccagacaagagtcgtgacatggagttcagagaaagagaaaaggagagagagccaagggaacgagacagaggaagcaggtacccctgcatattattttcacttcgggttgtttagcttttggcttctcggtgcatgttgttcttgtcatatttgccttgaggattacttggatgcgtagttgcaattattaatttgaggcagtattatggtgctggtaaattttcacattttatacgtaattctaacacgcagtttttctatttctttgcaagcgtgaacacaatatgatgagtgttatcgtaatgtttctcatacagtactggtttggatgtaatatggattcacttttagactgtaattttattgttgatggcaagtttcaggctttcagcctagagttgtaatttcgatgatgattttttttttttgcgaggggaaccaaaatttttttacttctttttcggcattcggggccgttcaaggggccatttggaaggngggttttt

SEQ ID NO: 14413 - DNA, 531 bp, Gossypium hirsutum
cacggaattgatgttaatgtagagttttcttatatatggacctatgttcttgacatgttagtgaagagaaaataagagaaagtaatgagaaatagtgtagagaaagaaaataagggtgttataaacatggtaaataaacatattgcactaaaacaattttagacaacagcagtaggttaactttgaaaaatcaccataaattttgaaaaaagaattagaggatgaaaaaatatggaattaaatcttattcagtctattttcttataaaagaaaccgtgtaagaaatagaattttgaattatgagatataataaattttatgagacaaggttagaatgattttgggttcccctattctaactttggaaaatcataaaaaattaaataaaaataattatgggattaaatttatatttttagaatcctgaatgagtctattttcaatagaaacaaacaagaacattattctaatcttgtacaatgagataattaatttttaatgaagaagggttggaactgtcagacttcagaa

SEQ ID NO: 14414 - DNA, 438 bp, Gossypium hirsutum
aaagggtcccaaaatctcatcaagacaccaaacttcacaacagccccatatctcgaagttttaattatggaaggctgtactagattagtagatgttcatccatcacttggagtgcttaagagacttaaacttttgaatataagagattgcaaaagtcttaggagtcttccaaccaaaattggaatggaatcccttgaaactttaattctttcgggttgctcaaatcttgcaaggtttccagagattgatgggaaaatggaacatctgaaaactcttgatctttgtgattgttataaagttgaatatttgccagagagtttgcatcaagcagaatctttggaagagcttgacttgagtaaaacagccataaaagaaccaccacccttcatttctcaattgaaaaatcttaaagttctatatttcgatggatgcaagggt

SEQ ID NO: 14415 - DNA, 415 bp, Gossypium hirsutum
ccataagaggtgtgaagaggtgaaatgaatgtcaaaatctgaacctcaaatgatagtgatagtggtggtgaaggggggccggccgtgtaatggggggcagcaaacattgaaaaagcagcagttcaattcacccattccaaaaccatcaattccttcattacatccaccccccacattgacaataacacacaagcaaacaaatcaacacacagcttccacccactacaataaaataaaataaaaacacaaatagtttagggttttgtaataaattttataatgattatggtgtaaaatataataataataatagattttctaaatgttttcaacttaaatatttcaaattttacagaaataccattcaacatattcaaactaataaaattagtacataactggaagacctcaaaga

SEQ ID NO: 14416 - DNA, 643 bp, Gossypium hirsutum
aagaggagtgcactagtttggcttcagcgaaatgctggatttgcttcctagttcccttctcttcaaatttcttgtttatgttgtgattataaatatgaacaattgttctattttttttcttgttctaaagaaaatgctttaaatttaaattgattgcattctatccacttaaattattaaaatcatgtttgtgttgttataggccttcgtaagttgttcaattaaataacaccatacttatattatatttgcattcacgaatgaattaattattaagtgtattgaaattgtaattaattgacaaaatatttaattcgtgcatgtttaatcttctaaggtagctgaaggttaaattagcgatggtattaaacggtacattagccttacataacttgcaagattattgtgattaaaatatttcaatatagaaatatattgttacctcacttaatcatatatgtgcttatgaagattgattaattgtttgaatttgcattgaaaaatgttcaagagattggttaatttagtaagtatgtacatgcaatacttaaaaaattaccaagttgccgtgaaaatatttgtaacaacctgaacattggtttagtaatactaagttaagggatgtcctttgatctaacacaaa

SEQ ID NO: 14417 - DNA, 654 bp, Gossypium hirsutum
aatctgaaatatgtgacatgcccagatgagatagtatatcattcatactctaccaagtcatggttcccttaaaaaataatataggaaaccatttttgtacctgatcagatcatgagtcccaccagatatagcatttgagatggcttgtgtagcttgtatccaaatatcatatttatcatcattttgaagcaaatgaagtagaggagcaataatattagcttcaattatagcctgtaaaattcataccattacccatcgtttcattgcacaagtcaacgcagataaaaccttaggttcaaaattgatacttgtacctttatttcctgttgtgatacttgagattgtccaacaagcaaacttattgattctcttttcataattatttttcaaaggtttaaaaggcatgggaatgcctgatgattaatgatacactttgtagcaacaagatttgcccataaataagaaaataaatcatctttaacaactaaacctaaaaaaatctttagtctaattaagagggggtataaatgtgattttagtgagaaaattagttattaaaagaaaatgatatgataaatggaaagagatacatattctagtaagatcatttaaaaggaaaagcaaattaaataaagtgcctgatacctgaatttg

SEQ ID NO: 14418 - DNA, 504 bp, Gossypium hirsutum
tcctctattaaaggttcttcctctgctctttccaccggcgtttagcattgttgctgatgacttgaatatatacgatttatacagtattcgaatttaaatttgcaaatttattctataaattcccctttaaatccaaatatttctttgtcaaatttcaattaaataaattatatctaaaaatatctaaataaaaaaattaaagttcaatatatactttgaatatttccgttaattataaaaacaaaaaatttgaataatgacattttagtttaaattatcaaaaataaaagatataacagctaataaatattgaaagattaatatccgttttcactttgaacatataataattaatatacctagacttaaatattatatgaatttttctataaaaaataaatcaaacatactacatattacaaacatcatgatttgacaaatagttcaaatcaaaaataaatagtgatcatattcgaaacatatcacaaccatgtacgaacacct

SEQ ID NO: 14419 - DNA, 1223 bp, Gossypium hirsutum
  misc_feature (29)..(33): n is a, c, g, or t
  misc_feature (456)..(457): n is a, c, g, or t
  misc_feature (460)..(460): n is a, c, g, or t
  misc_feature (473)..(473): n is a, c, g, or t
  misc_feature (476)..(476): n is a, c, g, or t
  misc_feature (484)..(494): n is a, c, g, or t
  misc_feature (497)..(497): n is a, c, g, or t
  misc_feature (499)..(501): n is a, c, g, or t
  misc_feature (503)..(509): n is a, c, g, or t
  misc_feature (514)..(514): n is a, c, g, or t
  misc_feature (516)..(525): n is a, c, g, or t
  misc_feature (527)..(528): n is a, c, g, or t
  misc_feature (533)..(541): n is a, c, g, or t
  misc_feature (549)..(555): n is a, c, g, or t
  misc_feature (557)..(577): n is a, c, g, or t
  misc_feature (584)..(588): n is a, c, g, or t
  misc_feature (599)..(604): n is a, c, g, or t
  misc_feature (606)..(628): n is a, c, g, or t
  misc_feature (630)..(635): n is a, c, g, or t
  misc_feature (637)..(640): n is a, c, g, or t
  misc_feature (643)..(652): n is a, c, g, or t
  misc_feature (654)..(654): n is a, c, g, or t
  misc_feature (657)..(662): n is a, c, g, or t
  misc_feature (667)..(671): n is a, c, g, or t
  misc_feature (675)..(678): n is a, c, g, or t
  misc_feature (681)..(683): n is a, c, g, or t
  misc_feature (686)..(696): n is a, c, g, or t
  misc_feature (705)..(717): n is a, c, g, or t
  misc_feature (720)..(725): n is a, c, g, or t
  misc_feature (727)..(735): n is a, c, g, or t
  misc_feature (738)..(739): n is a, c, g, or t
  misc_feature (741)..(743): n is a, c, g, or t
  misc_feature (745)..(752): n is a, c, g, or t
  misc_feature (754)..(754): n is a, c, g, or t
  misc_feature (756)..(758): n is a, c, g, or t
  misc_feature (760)..(765): n is a, c, g, or t
  misc_feature (768)..(796): n is a, c, g, or t
  misc_feature (799)..(815): n is a, c, g, or t
  misc_feature (820)..(833): n is a, c, g, or t
  misc_feature (836)..(844): n is a, c, g, or t
  misc_feature (846)..(852): n is a, c, g, or t
  misc_feature (855)..(858): n is a, c, g, or t
  misc_feature (860)..(860): n is a, c, g, or t
  misc_feature (872)..(897): n is a, c, g, or t
  misc_feature (899)..(904): n is a, c, g, or t
  misc_feature (908)..(908): n is a, c, g, or t
  misc_feature (912)..(950): n is a, c, g, or t
  misc_feature (952)..(973): n is a, c, g, or t
  misc_feature (975)..(977): n is a, c, g, or t
  misc_feature (979)..(981): n is a, c, g, or t
  misc_feature (983)..(983): n is a, c, g, or t
  misc_feature (985)..(995): n is a, c, g, or t
  misc_feature (1002)..(1003): n is a, c, g, or t
  misc_feature (1007)..(1021): n is a, c, g, or t
  misc_feature (1026)..(1034): n is a, c, g, or t
  misc_feature (1037)..(1047): n is a, c, g, or t
  misc_feature (1049)..(1064): n is a, c, g, or t
  misc_feature (1067)..(1078): n is a, c, g, or t
  misc_feature (1082)..(1085): n is a, c, g, or t
  misc_feature (1089)..(1098): n is a, c, g, or t
  misc_feature (1100)..(1106): n is a, c, g, or t
  misc_feature (1109)..(1112): n is a, c, g, or t
  misc_feature (1120)..(1127): n is a, c, g, or t
  misc_feature (1131)..(1137): n is a, c, g, or t
  misc_feature (1139)..(1145): n is a, c, g, or t
  misc_feature (1148)..(1148): n is a, c, g, or t
  misc_feature (1150)..(1150): n is a, c, g, or t
  misc_feature (1157)..(1160): n is a, c, g, or t
  misc_feature (1163)..(1164): n is a, c, g, or t
  misc_feature (1167)..(1167): n is a, c, g, or t
  misc_feature (1170)..(1171): n is a, c, g, or t
  misc_feature (1174)..(1174): n is a, c, g, or t
  misc_feature (1176)..(1184): n is a, c, g, or t
  misc_feature (1186)..(1190): n is a, c, g, or t
  misc_feature (1192)..(1194): n is a, c, g, or t
  misc_feature (1197)..(1206): n is a, c, g, or t
  misc_feature (1212)..(1214): n is a, c, g, or t
aagtagtagtataatatcattgagagggnnnnnctttaaaaaaaaattgaaatgttattcaacaagttagccattgccaattgattgaagcaattaaattcggtttacttagttttcaaatttttaaaattgaaactgaaccaaccgaatattaatctctacatttgaaacatctagcttaggttgtaaaatattattacagcatgcatcatcaagtactttaccattcaaagggtgaaatttgaggacattggatgaaaatatacatgccacttttgtgcctaaaaccttttggtttttgcagtttgagagacaacacctttcctggatataagcttacctgccattgcaattcagaaacaccaaaatggattttatgaaagtaataattcttctctttgcatctaataattgttaaagaaaattgagcaaaaaaaaagttctataaaaacaatnnacntccaaaatttccnctncaaaagannnnnnnnnnnacnannntnnnnnnncaaantnnnnnnnnnntnnaactnnnnnnnnnattgaacnnnnnnnannnnnnnnnnnnnnnnnnnnncctacannnnncaatatacacnnnnnnannnnnnnnnnnnnnnnnnnnnnnannnnnntnnnncannnnnnnnnncnacnnnnnntttcnnnnntatnnnnacnnntcnnnnnnnnnnnctcaattannnnnnnnnnnnnctnnnnnnannnnnnnnnaanntnnnannnnnnnnanannntnnnnnnaannnnnnnnnnnnnnnnnnnnnnnnnnnnntannnnnnnnnnnnnnnnncaccnnnnnnnnnnnnnnttnnnnnnnnncnnnnnnntannnncnttcatttctttnnnnnnnnnnnnnnnnnnnnnnnnnntnnnnnnttgnggannnnnnnnnnnnnnnnnnnnnnnnnnnnnnnnnnnnnnnannnnnnnnnnnnnnnnnnnnnnannncnnnantnnnnnnnnnnnctctacnnattnnnnnnnnnnnnnnncatannnnnnnnnacnnnnnnnnnnncnnnnnnnnnnnnnnnnaannnnnnnnnnnntctnnnnatannnnnnnnnnannnnnnnaannnntcttattnnnnnnnnattnnnnnnncnnnnnnnttnanactcccnnnnatnntcntannatncnnnnnnnnncnnnnncnnnccnnnnnnnnnncatccnnnacatttatt

SEQ ID NO: 14420 - DNA, 341 bp, Gossypium hirsutum
ggtgcgcttgccttttcgtcgtgataatagttagtctaggtttgatcttcattataaatatttattacttgttacgaatcacgcgatcaagtttttggcgccgttgccggggaactgaaatattaggaacactaaatttttattactttagccatttatttttcttgcaattttattttattttattatttattaatttactttttctctctcttggcaggtttttatagtttatgactaaaaaaaacccgtcaggaccattactttttgacaaaaaaatcgatcggacaatttgaaaaaatcaaaaaaaaataaggggtaatttacaatacacggaaaaa

SEQ ID NO: 14421 - DNA, 695 bp, Gossypium hirsutum
tgtccaaatctgttcattctaggctatacttctggaatgattttatttgatgttattttttgttaaattctgcaactcattttgttttgcatgaatttagtccccttattattttgtcataatcaatcccttcacgttttgaaattttctatttagtccttaagctaatggattcctgtcatcttggattttctattttacaattcgctttatgttggtgaggtaacgggtacacatggaattgaatatattttgataaattaaaaacaaaaacaaaattaaaattaaaattaaaattaaaattaaaatactaataattatattaaacagattttaagtttgctctgtaaactttatttaaaattaaaaattcttttgttttttgtatcgtcttatcatatttttgcttaaaacggattgacattttaagatggacaaccctttgaaatccaactaaaataattaacctgttttctcagcttttttatctttatgtttaatttattaaaatgtaaacaaatggaaattttttaatttcatatgtaataaccatcttccatacataaatacggtggaaattataagatgaaaatcgagcaattcagaaagtggattcattttgctatcttagactaattttatatgcctacggaagaagtcaattgtcacttcttcagatcgcacaacgagtctac

SEQ ID NO: 14422 - DNA, 614 bp, Gossypium hirsutum
  misc_feature (56)..(57): n is a, c, g, or t
  misc_feature (59)..(59): n is a, c, g, or t
  misc_feature (61)..(62): n is a, c, g, or t
ttacttgttcgaggtaaaacccggccgcaacatatgcatgaccacattcaaatacnncntnntcaaatatccatcgactttcatttattcaaatgagatttaacaattttcaggcatgtgattatttcatacatttataatattcatataattcaaataaacacattccacatacatttcaagcataaaagtaacatttttatcatttatcatttatcaggtattatcagttattaggctttgtcgaatatgtcttcaatattatatatataatatttatacaattcacatacacacaacatttaattgagcatataaatatacataatttagttacacgagcttaccttgtcaaatgttcatgtatgtaaaatctactaatctgatatttttctcttttcctcgttctaactccgaatttggtctatctggatctatacgagtaaatttaaaatcaatttaatacaatttaaactcaatttagtccaattcacatcttaggcaaaattaccattttacccctaaacttttaattaatgatgatttcgtccctaggctcggaaaatgaaattcatgcaatttaatccttgttccaagcttagctgatttaaaaa

SEQ ID NO: 14423 - DNA, 699 bp, Gossypium hirsutum
tgtatggaatctgaccatctctttgtaattttctttattcgttttgtattttgttcgtttatttcttattgtttgatatccaagaaaaagaaattagaagagccatgtaatctgataattgtgtaaaaaatgacagaatcgttaattattgtttttgtcttgtttacatattataaataatctcgtctgctatgtattttgcattatatctttaggaaaactatgacttcttccatgacttgagaaaagaaaagattccaggacatgctttaaatgtttttttacggattggcgagagttagaagtaaatatataatatgtgggtttctgatttgggtgaatttatattttcaagttttgttttggttggcgtctctttaattgagtcattaaaaaatgatttttttcttatttttatatcattttgaaataaaaaatacaaattttaggattaaaatgaattttcttatctataagcattattgaataaattttaatctgaaagaaaatatttatcgtacttattataaaattggttttttaataatttatttttattgaaattgttggcataattataattttttttaaatcataggaatggaatatattataattatttagtaaaataaattgtcaggaataagggaaaacatattttatcgttaaatgcacgacgtaaaaaaacatttaaagcat

SEQ ID NO: 14424 - DNA, 666 bp, Gossypium hirsutum
gcgtaggatctaatcacaggtctagacgagaaagaattcttgcttcgacctatggttactcaaaaggcagattcatccttgactgaaccccctctcaaaataacgtgtcttttgatagaataattgcttacctctttatttcatattggcagccttttatagactgttaataaaaaaggaaagagtcctaattgacgaaagtgcataccatgattcttctgtctatcaataactgcgtgcattgcgcgatataaaatagaattcctaacttagagtttatgaaggcaacaaaaacctaatatagtaaaactaaaactcttagtaaaacctgatataataaataaataaaactaaaaactcctattgcaattaaagcgtccatatcattactccccttctcgaaattgagcttgtcctcaagctcaaattcagaataaacttcagaacttatccaaaatcatctatctcatcatcatcttgcttgccttcaacatctggtacttctatcaaaaataaccttttacatttgtgtcccatggaataagactcgtcacaattataacacagccctttagcgcttctttccgccatttctatctgtgtcaatctcttaataaatggtgcagaagaacctattttgccgttgttccttgttggttctattga

SEQ ID NO: 14425 - DNA, 651 bp, Gossypium hirsutum
attcatattactgtgcttcagctttttcatttcaaaatgtgaagatttgattttgcttacttttctgcatggaatcttttttgacgttattttttttcaaaattaaaatccaagaaaaagagagtgagagagagacaatcttggaaaagatcagattttcttatatggctttatttgggttttgttggccaccggttttgtgcttttcttgttttttgcgacaatttccggcgaagtataaactacaaagcatgttccctaagaaatatatactgctaagatattcttaatttcttgtttttagttttttctataaaatattcttcttgtttcttttatataacatatatgataccactaaatgaaacatctcatattcaattcgatcgtcatgtctgagttacgagatgttacattcattaccagagtaactacgatcttatttgcaattcaatttatcaattaatacaagttattaagttcaatacatcgagatgttatatatcatattcgggatttaaacgagcttacgaaagctctttcgatagcccgagaccgattgaggactaaaatgtaaaattttttgaaactatcgggctagcctcgcaacatcaaaggcagaagctcaaggtctaaacttcgatggaaagg

SEQ ID NO: 14426 - DNA, 406 bp, Gossypium hirsutum
gtcgatcgaagttgtgatcatgtttgagcttagatcatttctaatttgagttgttaaatttatatgattaaataaattgaatctgatatgagtttgaattaattgggtttgtgatcattgacactagtaaatgggtttttgttaaacacttgaaggaactgaagacatggaccggttaataacgacagtgccaggcatggaaacttatcttcgatgtcgagaccttcctactttttgtcgtaaactggacattgaagattcaatatatatgaagctagtcgtagaacagacacgaaagagccttcaagccgatgccttgatactcaacaccgccgaagagctcgatgggcctatactatctcaaaaacgcaccaaatgccctcgtgtctatgccgttgggacctta

SEQ ID NO: 14427 - DNA, 630 bp, Gossypium hirsutum
tggtgaagcagtcaaagtcagatcataagatgatccccaaaatgatttatcattttgaagttgttattctatcaatatttctttcatttaataattcttgggtataagatggttgaaactttaaagtatgtatttcaatttggtagaaaccatgtcacattaatatttataatctcaatatttcttaagataatacatgttcagattttgtctggattttgtttttatcttttaatatttttaaagactcaaatcaataatttagccaaaaataaaaatgactggaatctatgcttttatttctgaagttaaatcttttatattaagatggtaaaagtgatggggtattttaataacatggaacaaaagtaaaaacaagtctttgtcaattaaatcttcatacagccatgcatagcaaccaaaatcttggcttgcaaacgtcatttgtacttggactttggatgtaacttccctcagtttttcaactcattaccatacttcactacaaattaatagctttcgtgtaccaatcagcaaagtcatttcatttttccttttttttttttaaaatttgttttttaatttaaattccggctttcaattttcccccccaaaaatttaaacccgaaa

SEQ ID NO: 14428 - DNA, 549 bp, Gossypium hirsutum
cttcccaatacatattctttgtatcatgtaagtcttaggaaaatggtgctcaggggaaggttgccatatataatttgtaaagatgagatctaaactgaatcttataggatagtatatgaaagtatatcaaatatatttaaaaaataagataatttaataaagaaattatatttaaaatcataacccatttaataattttggttggattttatatataggattggataaaattataaatacaagcatataaaaattttgagattatgaaaaaagagtgggtaagttggggtggacaacaaggatcatatgcttttactttaccaagatttaatagaaagaaagaaagaaagaaaaaggggtaagtccaaaagataaataaagaaaagaaaaaggcactgcaaattgaatggtattaggagtggatcagattaattcacattatcgctctaaatataagattaccataattgttttaacaatttttgatattattaagaatgcaattttaaataatataggagagaatcttagtgctacttgtgataaaaa

SEQ ID NO: 14429 - DNA, 643 bp, Gossypium hirsutum
tgccctttccctttaggggggttgttgctgcctactaatacatctagaaacacaatataaaaaaagatataatggtttttttgggctctccaattttataaaaaacaaattattttagtcttttatttattattttaatctttttagcttttaaaattgtcttttttgttagatcaccctgaaataaaagaaaaaaaatattttttttaaaaaaaatttgttatctgagcgtttgatcaaatctagtcaaatcaaaactagtgaaatattttgagttgatgagttttattttgtcatcttattgtgtgaaacgaaatttgagttgaatctagtatgataataataaaaataagatattttaacatgataaatttgaatcattaattaatttatttaggtcttaaaattattattttagaaaatttttaaaaatttaattttcttcatatattctttagaatttttaaatatatatataaattttgaaatttttataaatattttgaatttttgaaaatttttgacgagagagaccaatttggttattttcaaaattaacggggaccaaatggatatttatactaatttgttatttgaattgtaaaattcaacttgactcaagctcgaaactcaaataacttgg

SEQ ID NO: 14430 - DNA, 648 bp, Gossypium hirsutum
aggatcaatgctaggctcactctttatgctcaagaagacggtgagaacttccacagaatgaaggtgataatgagggactagagagcttatttgtgtaagggtgtaggaatgaaagtatatgatattatcatggttggtgcacctttcttcaagccaggcaccattgctctctgctgttgcattgtttaaaaaaatgtctttttcttttgtaatccttaagcttagttatcaatgaaatctaattatatatactctcactttcatcactcctaatctcctatgcttgcaccctaaagtttattatttcgaacataaggtgaactgattatgaagaatatatatatacaccagtttacttgaatattctatattggtaaagaaaaataccaaagtaattgatttgaaagacattttaggcagagacatagatgtattcaaccaaaatgaattgtgaaccaagctatatgcagcttgcaccagttacctatagagcatggaaggtaattttggtgtaagagtaacctctaatggtgtagctttaggagcagttattccggggctttcactcagccaacaatacatgcaatgcaggttcacttatcgagtaataaataaagaatagagtggcatcgcttcgggaaactgatg

SEQ ID NO: 14431 - DNA, 671 bp, Gossypium hirsutum
ctacagtacccaatctcaccgctatagtaactaatctcactgccaccgctgtttttaaactcaccggagctaaacacactgcccatccaaagtatttaactaagtcataaaccttgagcagattctacattatacctaagacatagttattatgtatcattatgcatcaattctgtcataccaggcccttggtgcttaagaaaacttgatgcatcatttgatgagaagaagatgaagaagacgccatgaaagtgtatggattgtgagattgaggaaaaagagcacaaataaaccgtgggagctttgcttttgcttctactttttattcaaattctcttatattttggatcaaccttcgagcttgacatttgcattttgttagtaatacgagctgttatccttatgaatatccaatttaaagggactgtttttcttgcctagtctgtgaaataattgttccatccattagtgtactatttggtccccgacgccccacaattaagttcacataatattgattttcatgtgtttttttccttaccttcattcattgattgcaaaaaagcaaatcaatactatgctacaaagccgtcagtcatcctcttggctgaattttcatggaaattctgcagattacagtcttatagctgtaacttcataacgcaccaaaa

SEQ ID NO: 14432 - DNA, 438 bp, Gossypium hirsutum
gtgattgtgctatgcttcaaatgacctctttttgtctcatagggctagtgacacggacgtgtgctattttagaatcgaaatgcatgtgtccctcacagttacagttaattatacagtctagccacatagtcgtgtgatcattgcacacacagtcgcagcctttcacatggcctggccacacgaccgcgtgacccatatttttagaaattctcatactttttttatatatgttcaattaagtccttgattgcttccggattgattcaaaagctttcataaactcgtttgagactcagatttgattatagatcatgacatacttaaattatgaagtgtttaatgtttggattgattgttaaatgttggttttggttgtaactattccgttatatgttgtagcatcctataacttaagttcgacgatcaaaccagattaga

SEQ ID NO: 14433 - DNA, 663 bp, Gossypium hirsutum
tcacagtcgacactagcaccttcatagatgcttttcataaggcattttgacaatgcttcttctgatagcacagtgctcacattacccatcctttcttctagatctagtaattcctgtcatgatatcaagcaaagttaatctccattgttttatctttaacaataaacttagactagaatacatcttagtgagcaaaaacaaacctcatatgacatattgtctatatccagcctcatgttactatactggtcgtaaaagtttaggccatcaagaaacaaggtggtctctagagcaagtaattgctgcaagacagaaaccgaatcaacaacagacaacccatcgggtagaaagagacactccaaaactagttacctcatgtgtcaaatcttcatcttgttcgatcctctctaatgctaataaaacctgcataaaaaataaaacaatagcgatagatgaagcttcagtacttcaaacaaactgctaatgctttatgttagcctctctctggagagtatattgagtcccttcctcaagttccatagaaagaaggaatatagaatataaagatataaatatgctaatatacctccccagtgccatcaatattgtagtgccagaagctgtcacggttaacacctatttctgaaggactagatggcatga

SEQ ID NO: 14434 - DNA, 354 bp, Gossypium hirsutum
tgaatctcaactaatttaactataacatatgcatttcattcttaatatttacataataattgaaatccaaatccaaattcccaaaaggaggagcataagtgaatttaacttgtattctcaaaaccaatacaattaacttacaataaaaattagtaataggcggacatactcaacttgaaataagatcatagacagacaatccaaaaagttattgaattttttatcgttaagggaaagtgcgtctaagtgagtacaatttctgtatagttggtataagccaaaaaaaaaaaaaaaaaaaaaaacggaaaaattcggctaatttaccccttttttacaattccaaaaactttttct

SEQ ID NO: 14435 - DNA, 550 bp, Gossypium hirsutum
tttcaataacaataatagatattagtgtccgcttactggaactacataacccagggacatcgggcaggaataaaataaaagtgtcggtcatcgatggtatttgctagcctacgacttccttctcaatgaaaacaaagttttacattttttatattcatttttagaggaaataataggcaaggatttatagtttatgagctatggttaatctttgtcgccatccgtactcagcatgttctgaaactagttatctccaacagtttttaatttactgttatgtatttttatatggtttaaaccacttcatattaataaaaaagattaaagtagacgcctccacaatgaaaaagaaaataaccaagcaatcaaacatgatcccatgtgaccaagattagtaggtgtccaataactaatcaaaagaaaagaaatggtacaccgaattcaatgtactaaaagacaagtatttgtatgtatgtatatatattaataccaacattattctaaatctccaaacctaaaataattatcaccaaacaacatgcagtactca

SEQ ID NO: 14436 - DNA, 421 bp, Gossypium hirsutum
tggcctttgcctcactcctctgtaatgtctcttccttgtattttcttcacatgcataaagccaatgcattaggacatgacatgatatatatcattttatgatataaacattttatgtattttatatatgcaaattaaagtgtttgtatgtttttgcatgcaatcatgagacaaagggaagcaagaagtggtgaaggccttaggttgtgctttttttttcccaaatataaggttacaaatcaagtaacaagcaaaaactcataacacccaacactgaactgaagtatcagtgaaagtagttttgtgtaattaatagcataatctatatgaaagtaattttatgtccaaaattgattaccgaagtttggttcctttttattgcatagttggattaaagttaacgaaggccaataacgaaggcc

SEQ ID NO: 14437 - DNA, 433 bp, Gossypium hirsutum
tgcatccggtccttgaggatttgaccctactttcccttttgctgttctttttcattattttgtaggaaataggatattttttgtgctttcaacgaccacatcattttataataattgtataacaatttgtctcccaccttgtcgaataagagttacaaagtgactcttctgaacaaacttagactcatggaacgtgtaattggaggcttattacgtaagttttaactcggaactctactgagtaggttccattgtctgacgttgtgatactaaagttaaaaggttatatgagaaatggttttaaggaaacaaattgtgttgtagaatactacgaactgtatttcccgtaagtaaaaatatccattaccttgtcgaagaaattaacgagctttaaaaacaataatcatgatcgtgaatcagtgaactggtagaa

SEQ ID NO: 14438 - DNA, 700 bp, Gossypium hirsutum
gcaaccactcaaagcttgttaaacaagaccactgactgttttggttttaaacacaacaatatagagccaaaagataagggttagggaaaaacttgataagcttctatcaagcttagcaaaagcaggttttttaaatctaaatattaagttgaatacaagcagcaacattgagacatgctaagctcttaacatgcaagcacatgccatggttcatttgcagctctacccgacaaggttaaattaaatttagaccttctaaaaaaaccaccctcctgaaaatgagagtttttatccaagagacataagcacataacttttaaactcataacctatctttttcacttaaatctacaaaatgcttctgcccttaccatcaataaactgaaaccagaaaacaaatgttcaaaattaacataatgctttttggaaaacaatagaaggcaattcttatagctccttatcccacccaccatccaagaaaacagaataaagtttttcctttttgttttatcatcttgtggaatgctgtaattaacttaacagtcatctaattcagggacagattttaaaacagaattagacttcttgaaaactgggaaaagaaacaaggtccacctaggcccttcaagatgctggcatgcttcacatgatgcccacattaaggatgcaagtaaaacacaaggcataagcagagagaaag

SEQ ID NO: 14439 - DNA, 601 bp, Gossypium hirsutum
  misc_feature (565)..(570): n is a, c, g, or t
  misc_feature (572)..(572): n is a, c, g, or t
  misc_feature (582)..(584): n is a, c, g, or t
  misc_feature (586)..(592): n is a, c, g, or t
tcacactgacctttagagtttgggttaataaaaacaaattcagacctgtgaaaataaggttgaatacaaatcaaaacgcactggccttcataacaaaaaggtgcagaaaatcaacaataggtacaaaagcctgttctgtaacagattgcattcagattgatgcatagacatgcgaattgcagtgagcaaaacttcgctacgtgcaacatcccagataattacaaaattcagttaaggaatctgctaacagaaataattttcttcccacaggaagctatgtccatgaaagcactctgagcaaccgcaagaaggctacacagtggaggtggatggagagggggtagaatggctatagtaagtagccgtcgtaggaatgaattattactcacaaaagaaacgatgacagacaggatgagccatgcagtcaaaatagtcagaaatattatgcccacgcatatgccgggtaggggtattttcaatcttttaagttcttctcgcatgtgttgaactgtcaggacaacagtatccataacaatagtcagaaataggccaagtgttagtgcannnnnntntttctccttnnntnnnnnnnttttttttt

SEQ ID NO: 14440 - DNA, 625 bp, Gossypium hirsutum
cgttacgagctcggggatcgtcagcaaagttcatcactctatctactatttcggtacttaaatatttgaactcaacttatggcatgtataggctggacgaggttttgaatgttacattataaattttgtatatgaaattaatagccatgcgaaaatggcttatttcctatgattgaatttggtttcgttgcatatgtttttaaaaaaaatggttgtgtttgttcggtaatgcctcgtaactctaatttggcgacggagacgggttaggggtgttacattttgtgctgcttctctgctctgcgctcgtaggttgtgttgtggtcaaaaatataagaagcctcggataaaatttacagttcgcctcattttttcgtggcaaattttaccataagaatatgaatcttggaaaatttgtgattcatgtccgatcttttccaacattttgaaaactgttttatattcggtggtagagttttctatagaatgaagattgatatggaaaggttttcatagttaaatttcaagcagaatatttgcatgttgaagagaagatcgttgatgttaaaaatctaaagttgaaaaatcgacccaacaaaataaattagttcaagtaagtaaatatggt

SEQ ID NO: 14441 - DNA, 676 bp, Gossypium hirsutum
tgcatgaacttgttcttctctccaacagtgtttaaaattaacaaaaatgcacatccctatccagtagattttaaatgccaaaacttaaaagtttaaatggcatcacaggataagacaacaatgcatttgcaatacttacaacaactagcaacagaaactcccaatttctcaaagttgttatatcagaaactagaaaacaatagagtttaaagacttacctggaactgaacaaaatcagctctaacctctttactgcatgccaactcagttaatttagcagcaaaattctccgtctcttttggatcaatatcaatacaaacaagcttctcaccacaggaacgacacacaccattctcagtcatttcagtcctcaccaccctccatctcccacttccaagccaccctagcccatgccaccctcctcctcctcctataactgcttcctttatctgcttcacatcccatttttcagccccaacacttgcagcatcctttgatttaaaccaatcctcaacaacttgaagggttgattccgagacttgcctcactgaggctcgcaatctttgcaacatctcatacaccttgtcggccttcttcgtattgatgctaactttcagaagagctgagagctcaggctcctcaggcgtcacccctgattcaaactataaagcatcca

SEQ ID NO: 14442 - DNA, 675 bp, Gossypium hirsutum
tcaagagaaggctgattcaagctatgagcagaataactatcaaatcattggttacatgaaccatcaatcttaattcttaaagctgggtaatcattaactggcaatatcatataactagtagctgctctaattggcctgacctgatgaataagatgactgaataagtctcgcctaaggcgagctacaaccctttcactggcagaagaaaagagccatgaccgaagtgctgtggacacagacctaaatggatgagagaaaaataactatagtgtcaaacttttgaagtcaaaagatcaagtaatatagtttataaagttgatgcatgaatatggatgcaatagactaaggaaatagagatatgaaaattcctaaaaaggaactagtcttcaactaaattacatcatcatagaagtttattatagaatctgattcttaagacaatattttcaggttcagtatatgtttttgcaaatcttcaaaccttcttgaaatacaaaaactaattgacattttagcagaaactctgctataagatcaatatatacaagatattaagcgaaaaacatgaagacaagccaagataatgctgtttttaagataatctatgactagaacctgagatgtatttttttcttgaagcatttcaacggataagctggtctcatggaaacatca

SEQ ID NO: 14443 - DNA, 581 bp, Gossypium hirsutum
ttggaagagtagattgggccccaatataatggggtaatatattaaaaaaaaaaactggaacagtttttaaggaaatgaaaaaagagaaaacagtgttggattaggataatggtagagagggatttgttttgtgaattatgaagagtggaggagttcatagtttctgtcttaacttttgaaagaaaacaaacaaagtgggaacaaagtgtatgattaagactgctttggaaggagattagaataaaaatatggctttggtgaatataatttgttattttgtttctcagcataatttaagcaatttagacattagacgtgagagatttataaggtaacactatttgagtattcaataacttcaatcataaaatattttatttgctcaatagcatttccctattttaattatattatgtatttaaaatatacatgtaataaataatgaaatgtatgtttaacatataatttatataattttggggtttactaaaaaaaacaggtcgggctaggctagattcgggcctaaaatttttttctcgggccgggcttaaacaaattttcaaacctatatttcgggccag

SEQ ID NO: 14444 - DNA, 677 bp, Gossypium hirsutum
ggacagagtcgaatttaacggactaacgaggcttcgacacccctaaaatataaaatttttatttaaatttttaattttttttaaaaattttaaattagcaataataaaaattatattttgacctcctctaaaattttaaaaattcaatttagtcctttaaaaattataaaaatttagattataaaaaattaaaatttcatctgacccccttaaaaaattattctagcttcgcgtctgaatataaagtctatgtcgatatggaaataattcataagttacttttataataacataaatccagttaaaagtttttataactaatttaatactttcaaattaaaaagaattagttaatatatattttttagaagtcagtgggggaggcttaaccttattgtggtggatatgcaagaagccaatggcccatgatttgggatgtgggtccatatccaagtcattgacctatcaataaatcaataaatatcattttgcactcaaatgggacctatcaatcttgatggaaacatatatctttatgatggggattttcttttaaattatacaagttagtcaagaaattactcccctcaacacttattttttaatcaaaatattcattatattcgttttacgtcctataaatattaataacttccaacgaatcatttacactgaag

SEQ ID NO: 14445 - DNA, 712 bp, Gossypium hirsutum
  misc_feature (667)..(668): n is a, c, g, or t
gatcagacttgaagagtcactcttggtccatttgaaaagtcatcataattagctttgggtgcttcaatatccccccaaaaatgttccaaatatgcaccagcaattaagtgaccatatgcaaactattttatgccaaaactggacagccaattgattgtgacagcatttgattcttcttggcaaacgaacaaccctattgtagctttaaatatgtgaccggccttttggactttcctacaacaatcatacaatcaatttatttaagaaaaattaaacacactataacttatgaattaaaaagtaatagccaaattaaatataaacaaattcaaacatatttaacaactaagatgcttaaatgcttggtttaattaagatgcaaactaaatgaacaatgaattacttaatgcatgaattcattaaaagatgcaaactttaactaacatgggagttacataatgtatgacataatttatgatgcaatcttaactaatatgagagtaacattgatgcgatcccagccgcatcatgtttcgatgcaactcaacgacctcagaattggcctaagcttgaggggcttaagtgcaaaatgaagtttaatttcagctcaatgagctcaattcttgctttttcaagctcgtctttgttcaacccaagctcattatgnngaaattaaacttcattttgcacttaagcccctcaagcttaggcc

SEQ ID NO: 14446 - DNA, 735 bp, Gossypium hirsutum
  misc_feature (709)..(710): n is a, c, g, or t
  misc_feature (716)..(721): n is a, c, g, or t
  misc_feature (730)..(732): n is a, c, g, or t
gatccagagctttcctatgactgttgttattgcttgatttcactatggaagctgcttgaagacgaagttctatgcatctgtatatatcagtgaaacctttataagcaaagtgctcatacaagtacaattttcatgctttattttttaaggtagttggacttagattttaggacttgaacatttatgagttgattgaatggttcatcacatccaatccattaggtgtatgtaatattattattgttttggacaaatcatactgtaaacagatgaagtgtgtcttctgattaaatttgtttttagtgagctcccataatggttatcagttatgttagtcctcattgtgccattatattgaaaacaatataaatgctaaccgagttaatactcaatcggcaaatataattgtattttaaaaaataatttaatcaaaaatttaattgaatacacacctagatatagtgtgaaatttgcaatcaaattacataatattaataaaattaatttttgtcaggaaaatggttaatattaatcatatttataatctatatgacctactaattaaagaaaatatttcaaatctttgaaatttataataatgcatatttatcacaaagtacaaacatgaagttattagtatgcattagaaaattaaatctaataaattacagtattaattatctggagaacaataaagcatgtgatgcanntacacnnnnnntcgctttannnttt

SEQ ID NO: 14447 - DNA, 652 bp, Gossypium hirsutum
cagaaggaaaggcataaagcaagtactgcgaacccctttaagcacgagattggacatcctactttctccgcatcaagaccgcgttcaccccctttcctttcaaagcattgaaggccgggtgagaataaagagggagggagcactcgtggcacactgactatatccgttcgagaagaaagcagagttcctattcaccgctacccctgagtgaagagtcgactcaaaagagcaattcaagagacaagcttgcttcttctcgcgggttggcttaatttctcttctttcagtcatggatggtcataatacttttgagtagactccttttcgtcaagtggctaagaatcttctctctgtggttcaacaatttagcgaatcttctaccttttttcgcacaaagtgacaatccaattcaatgtgtttgcttcgtgcatgaaagagtggatttgaagccagctttatagcactctggttatcacaaagtagagttagaccattaggctttatacccagctcagagagaaggtgacgataccaagttctttctgctgttgcatccgacattgcacgatatttttcctttgcgcttgatcgagaaactgttctttgtttcttgctactccataagataagtgaaccaagcaaagaagacaca

SEQ ID NO: 14448 - DNA, 304 bp, Gossypium hirsutum
ttatttgccttgtaggccaacacaacaaataaattaaaatatatacaaatattcataaaaattcaaataaaaaataaaaagttcaaaaaaattattatgaagtacatatggattgtcatgcgagctatcatatttaaaatcttaatattttagtcggtttttctgttgatagttcgactatttttaaaaagtcgatggtcaaattcaactcatttgaaaaggttaagggtaagaaaagaatcggagtcaaattaataaaaattgaaaaaattgagggttaaatttactattattttgttttttt

SEQ ID NO: 14449 - DNA, 804 bp, Gossypium hirsutum
  misc_feature (435)..(436): n is a, c, g, or t
  misc_feature (438)..(440): n is a, c, g, or t
  misc_feature (448)..(451): n is a, c, g, or t
  misc_feature (456)..(457): n is a, c, g, or t
  misc_feature (461)..(466): n is a, c, g, or t
  misc_feature (471)..(471): n is a, c, g, or t
  misc_feature (476)..(476): n is a, c, g, or t
  misc_feature (481)..(485): n is a, c, g, or t
  misc_feature (487)..(491): n is a, c, g, or t
  misc_feature (496)..(499): n is a, c, g, or t
  misc_feature (503)..(510): n is a, c, g, or t
  misc_feature (516)..(525): n is a, c, g, or t
  misc_feature (530)..(531): n is a, c, g, or t
  misc_feature (535)..(539): n is a, c, g, or t
  misc_feature (544)..(546): n is a, c, g, or t
  misc_feature (551)..(551): n is a, c, g, or t
  misc_feature (560)..(561): n is a, c, g, or t
  misc_feature (566)..(569): n is a, c, g, or t
  misc_feature (576)..(579): n is a, c, g, or t
  misc_feature (593)..(596): n is a, c, g, or t
  misc_feature (598)..(600): n is a, c, g, or t
  misc_feature (609)..(614): n is a, c, g, or t
  misc_feature (616)..(617): n is a, c, g, or t
  misc_feature (621)..(626): n is a, c, g, or t
  misc_feature (628)..(631): n is a, c, g, or t
  misc_feature (633)..(633): n is a, c, g, or t
  misc_feature (643)..(658): n is a, c, g, or t
  misc_feature (664)..(666): n is a, c, g, or t
  misc_feature (675)..(679): n is a, c, g, or t
  misc_feature (682)..(684): n is a, c, g, or t
  misc_feature (687)..(692): n is a, c, g, or t
  misc_feature (694)..(695): n is a, c, g, or t
  misc_feature (697)..(697): n is a, c, g, or t
  misc_feature (699)..(700): n is a, c, g, or t
  misc_feature (702)..(707): n is a, c, g, or t
  misc_feature (711)..(711): n is a, c, g, or t
  misc_feature (719)..(719): n is a, c, g, or t
  misc_feature (721)..(721): n is a, c, g, or t
  misc_feature (723)..(724): n is a, c, g, or t
  misc_feature (727)..(727): n is a, c, g, or t
  misc_feature (729)..(741): n is a, c, g, or t
  misc_feature (743)..(753): n is a, c, g, or t
  misc_feature (755)..(759): n is a, c, g, or t
  misc_feature (771)..(773): n is a, c, g, or t
  misc_feature (781)..(786): n is a, c, g, or t
  misc_feature (788)..(788): n is a, c, g, or t
  misc_feature (791)..(801): n is a, c, g, or t
aatggatcaaagtgagagggaacccatctatcagaaaagataaggggattatgatgatttcgagaatacggagccaaactgcccaaatacggtcgaaagtaaaagggcaaaataaacagcgggggaataaaaaattaaagaaaacatggttggaaaaggtgataagatagaggaagtaaaaatttcatctcaaataggattggcggcagccaaccgggtgtaatgaaaatcttatgctggaacatctgtggtttggggaacccacgagcagtacgtcaactttggaatgtactgaagttatataaaccccaacttgtcttctttatggagacaaaaattgataagagtaagatagaatcaatcagaaagaggtacggtttcattaacaggattaaggtgggagtggatgggagtaagggaggtttgtgtttaacnncnnncctccctnnnnccttnncttnnnnnnttttnctttnccccnnnnntnnnnnccccnnnncctnnnnnnnntccttnnnnnnnnnnctttnntccnnnnnttttnnnttttnttttgcctnntcccnnnnccttctnnnncccacccccttccnnnntnnncttcttttnnnnnncnnttcnnnnnncnnnntncatttaattnnnnnnnnnnnnnnnnttgctnnntccctccannnnncgnnnttnnnnnntnntntnncnnnnnnatcnccttcttntnannatncnnnnnnnnnnnnntnnnnnnnnnnntnnnnncactatttttannntctagctnnnnnntntcnnnnnnnnnnntta

SEQ ID NO: 14450 - DNA, 456 bp, Gossypium hirsutum
  misc_feature (62)..(64): n is a, c, g, or t
tttttctcctttattcttttctaattattaagaaaatcctgtagataggccattggtagtannngtttttacgattctcaagaataaaagcaatgtttcaagcctagattttgtttcttgaaaactcaagcagtaacaatcggtctaatagtagaatttaaaattggcatttggaagcaaaacaatatgaaattgtcgattttagtttaactattttagatttatgcatgtagaaatattttttatatttaaaaaaaattatgatttgaattatttttatagatttctaataatttttagtctgatatttaattttttacaattattgttaagaaaattttaaaaatatcaaaatgatttttttatctatagctcaaggaccaaattagctattaactttttgacttaaggtgcaacattaatattttaacgggaactaacagccgagtgacaaaa

SEQ ID NO: 14451 - DNA, 657 bp, Gossypium hirsutum
aatgccataagttactccgatgcttgaaatttccaagtaggtcaacaacattttgtttgctccgttatgttgttgattagaaaagtaagtttaagtaaaagtaattcaataaaagaagcagtttagggacactccaacgtactgcaaggcggagtaactacgaaggtagttgcctactccatccatcttctaagttaaaatccttaacttcatgagtgcatttcattcaaattgtgccaggatgaaagacttggcaatttagtgtacactccattgaaattgtcaagtaaagaaactacgtgacaagatgaattccttagtaaaaatacttgtaactaagctatgaaaagttagtttaaaaaaaaagaaattgagtttagatgaaagataaactaagtacattaggaggtacttgatatagttaaaattgtttgagcaattaggaagttttatttttagggcaatattttctgcacttactttgctaaataagcttatgaaacttgaaccgattctcggagactaaagataattaagaatggaggtaacagaaatatgtttcatacagtctggtagtacaaaagttaattatgagttatggaaattcttccatacattcatacatattttgcttgaggacaagcaataactcaggtt

SEQ ID NO: 14452 - DNA, 555 bp, Gossypium hirsutum
  misc_feature (446)..(448): n is a, c, g, or t
  misc_feature (512)..(518): n is a, c, g, or t
  misc_feature (538)..(546): n is a, c, g, or t
  misc_feature (548)..(550): n is a, c, g, or t
ggaaaaccttaaaattaaaggtggaagggccaaacctttggttaaagcaaggattgatcctccaaatatgttttgggcaaggtgttgtttgacaaaaaatgatattcatggtgaccaaaaacttatataatagttacttgacatttctttgagactcttgatagtgcacgtacttctttgctgatctttgtccgcagtctcttttttccacttagtcgtactgtaaacctctctaaaacctttgcattcttcaaaagatactcaaccacttgcgattcaaatggcttcccttggaatgacaacaacttaattatcttgactttatacattaaacacccaggtactttctctgtttcatccctaccgttgttatgactttcaagtccgcttccagaaaactgcgaaaaaacgtaaaccggagacacatttaaaaatataaacattcnnnctctcttctcatggggatgctgacatctcagacacatatataaattttaaaaaaaaaaaaaagnnnnnnncttattctttccttccttcnnnnnnnnnannncaaaa

SEQ ID NO: 14453 - DNA, 467 bp, Gossypium hirsutum
ttccgattttggattgacggttagggttaatattaggtaaattcttttattatagttcagatattcaaagagaagagaaaaatgtacaaaaagctattaaagatgctgccaagagaaatgacatggtttctgctaaggtacttcatttagtttttcttttttctaattttcttttgataaattgtaatcctgttttcgaattaaatttggttgctaaaattcaagattgaagttctttgctagtattcttttactgcattaattgtgtatgtctgtgtatacatgtatgcataaatcataatttccatcaaaatttacctgcccttatatgaggacaacctaaacatttgaagtaggcaaattttgacggaatatgctgataatattaatgattagactagtatttttaaatcgaaaaagtgaaaaaattaatttctaactcttttaagtgcagggactaattatgg

SEQ ID NO: 14454 - DNA, 350 bp, Gossypium hirsutum
tcaccggcctataatatgtaattatcaaataatgagcggcagtccctttttgcatgtactattttttctgtgcatgtgaaagggcgatgcgtcaatcttcaaactgaagcataaaaaattcagcatttcgtctttgtgcatttagatatttaaaatattttactattaattatttgtaatttaaattcatgatgtttagaagttgataattgtcaagcactaagctaacagccataagccttcggaacaatgatatttattcatggtagtttctcctccaagagggttctccatctttatttattatgattattcttattttcaaatacatatattgatttgcatttgaa

SEQ ID NO: 14455 - DNA, 377 bp, Gossypium hirsutum
tttttggaaaaattttggttaaaatattattgaagtccttgtactcttcctatatttgaaatttagtctttatacttttaaaatttagtctttacacttttcaaatttcaaattttaggtccattgttgatacagttaaaattttctattaaactcactggtttgatattttgaaataataataataaatactcatttgatacatcaatataacaaaaagatgatattgttttgaacttgaatttaatagaaaatccttttttggcgctctctttagctctatgtctcttatttctaggaggtcttcctccactagcagtgttttttcggaaaactccatatattctggtgtggatggcaggcaggcttatatatat

SEQ ID NO: 14456 - DNA, 594 bp, Gossypium hirsutum
  misc_feature (588)..(588): n is a, c, g, or t
gcatgactccgaatcatggccggcaccccacgttcaagtgcaaactgaacctgagcttcctgggtgtctcttggtgcaaacgacatcgctaggatgttccttgatagaaggtaagctccccaactcgcaacctgtatgtcaataattggttcaaacaaaaaccataaataattatttgagtgaacgctttttcttgagggtggtttcagagtcaacccaaattattatacttacaaaaaatgctcttattcaatagtattgatatttaatacaaattcaaagcactaactgtttaatactaattaattttatgttttggtcgacctgggcgacaaaatctagttgaacaaattttttttctttttcttttctgaaatcttaccttaaaatattctataagataaaagtatatatacttaccgataaaaaaaaaaattctgactatgaaggaacactcctcaccctaccttttatacatattcttacctaaattggctaaaaaaaaaatggaatctctccttatgaaaaatttttatttttatattccattaaaacccattgccctataaaaaagaatgcctggttganttaatt

SEQ ID NO: 14457 - DNA, 651 bp, Gossypium hirsutum
agattgaactccaaccatatgatcaaggggataaagtgagtaattactatgcgacacatattggttaaaatatgctccataaatttcttttagtttctcaaaatatccactagagcaagcctaatgattatttatttgtgttctgtaggcttattaaagggtagatactagccacaagtttcaaagttgctccatatataaggtagatctgatcatgggtcgggccgagccaatgcaaaattttaggctcgagctcagctcaacttgaaaaataggcctaaaatcctacccaagcccgacccaaattaaaaatgctaaacccaagcttgacttggctcgctcgtattaaaatttttttatataaaaaataaatttataaaatataatacattaaatacactaaaaacattaaaataaatgttttccaacaaattggaaatacattaaaaaagtttacttaaataacactaagatagttgcaacttagcaaataaatgtgtctaaaataatagcaaaattaacaataaaacaataataacaaaatagttgcaatataatagcataatggcagcaagaaacaagtttaggttgattcaggccagaccgggtcaaaaaaatcctacttgaggctcaaccagtttaaaaatttga

SEQ ID NO: 14458 - DNA, 506 bp, Gossypium hirsutum
ctgccaattaagttctcacacgtctaccatgtctcttaacaatatcatagggagcctcagaaaaagaatcagtcccctcttcctcttcccatcatcctctgataaactgacacgtggataagaatttgtgggacccacatccatattactgtcactgctgttcacccttctttcctaccacgtacataatgttctcacgtgcacggggattttgccgacttggaggaggtacgcacgcatccactagtttactgtcagacaagatatttttgttgcctttatttttacttaatagtctaatattattagggataatatattttttggaccctcacttcgtaattaagtttattttggtacgaaaatttggtaattggatccttttttatttttgaacttggattttgtccagttttaatgatgtgaccggtgttattgaaataggaatagattggataaaaaatcgattgatatattagttcaaataacaggattgaacccattga

SEQ ID NO: 14459 - DNA, 661 bp, Gossypium hirsutum
ggggggtacgtgatgataagtaataaatgttttgtcggagtgatcaaattgtgagggtagatatcttgcgtttttttttgtggaacagttcccctaacaaagggaaatgttattgaattaggttagatggtaaaaacgataacttcacgaagtcatgtgttgcaaacatctcggagagggtgtcctaaatagcaaggaaggcactagcaaagtacatgtaacaaccttaaaacctttttatcgtgtatattttatctctaaatagttttaagttgtgatctattaattgggtatttatctattttagaaattaataactttaattttttattaattatttgaagtaaaaattatttaacttttatgatactttgcacctctcttaataataatatttatttgccgagaaagaaaatctcatattaattgaaaaacgtatcaaaatatttctaaacaatgaaaaaaactcatcaagcattataaatattaccttatgatcaaaagacaaggctacagcaacaccacccctcgataacacagctctagagtccccgcaattcgccactactaccttcccgttaccaaccaccgccacaaccgccgtcgatcctaccatctcctctcccaacctccctcgactcacctcttcatccatcttctc

SEQ ID NO: 14460 - DNA, 318 bp, Gossypium hirsutum
  misc_feature (26)..(27): n is a, c, g, or t
  misc_feature (30)..(30): n is a, c, g, or t
gagacaacgtccactatcagacgaannggngcaatatgctcgtacggatgcgcattatctactgtatattgcaaattgtttctttgctgagctcaaaaaacaggactgtggtatgtttgctacctaaagattgtttggatattggtattttatcttgtttgtctagaagtggattggaagtttggggcaacagatcataataggaaagttctacatatattggtgatggtagagattaaatgattatgccaaaatccaaagaattatcactctgaattgttaaaggaagacattcacaatcaattagtgctttttttt

SEQ ID NO: 14461 - DNA, 567 bp, Gossypium hirsutum
tctctctttttcgttcttttaggttttgcggtttttgggagagaaaatgagggtatggaaggtaaataaaactgccttttagggatgaatctgaccgttggatgtggtttgatggggggaattaaatcgacggctcagattgagttctctggtgaggacttcgaaaaaccaaaaaaaaaaatacaattggaaaaagaaaaaaggttgggggagggggggagggggaaatactaaaataaaagggggggcttgggatgaatttgggaccgttggatgggcaatggggaatcgcatgatgatgaggatgttgactaggacaacaaccaaggattttttatattttctagggaaaattaaaaaaggtggaattttgtcgttgtcaagttcgtttgaatacaaaactgaaaacttttttacccttcttcttcttttttttttttccccgaaaaagggaaaaaaaaaatttaattttttttaaaaaaaattttaaaaaaaaaattaccccttaaatttacccctttttcctttagggttttatttttccaaacccaaaaaaaaataaaccaa

SEQ ID NO: 14462 - DNA, 667 bp, Gossypium hirsutum
tatgggtctctctgctacgatccaaggtttgtgggtggtgatggagttatgttttacttccacggagccaagggagggaacttcgccattgtttcggacgataaccttcaaatcaatgcgcactttattggaacccgcccccaaggaaggactcgggagtcgggactacacatgggtgcaagccctagcagttatgttcgaccgtcacacactcgtcctcgctgccaagagagtctctcaatgggacgacagcttcgaagcgctcatcgtacgatgggacggcgaggaagttaatgtccccaccgacggcgacgccgaatggagggcgaccgattccgatgaacgagaagtggtgatcgaaagaaccgacgaaaccaacggcgttaaagtgacggtcgcggggttggtggagctgaacgtgaaagttagagccattggagaagaagaaaacaaggttcataattaccagttaccggcgaacgatgcgtttgcgcatttggaaacgcagttcaagttcaccaacctgaccgatctcgtcgaaggagtgttggggaaaacctaccaaccggactatatcagcccggtgaaaagaggcgttccgatgccgatgatgggcggagaagacaattaccaaacgccatcgctgtattctcctgtctgcaaagct

SEQ ID NO: 14463 - DNA, 417 bp, Gossypium hirsutum
tgaaaccactcattgtccccattttaagtgaaggagagtgaagagtgtgtgtgtgtgtatatatatattgcacaaaaatcatttggaagattatcagtaaatcagcaattatggattttggccattgagggaatacctgaattccattgtttaatggaatggatgattcagtgtgttctcatatgttgattttgtatgtgctttgaattggaattgtgttggttctttgatgttattagtttctcatttgttatatttttatgattttattaaatttttataaattttaatgttattctatcaattatgtgtgtaattttgataaaataataattgcttgaaataaaatatatggcatctcttgttaattgttgctttttcacccccaaataatgcacactcacagacagagatata

SEQ ID NO: 14464 - DNA, 379 bp, Gossypium hirsutum
tccttatcaatacatttatttggagcttattcttcttgtttttagctcttcttttgaaacttcagaagcgaattgatgaagttcccattgaatccaaggaacttggatttaccaagcccgggccctacatttatgaactacttgctgatcttaatatcacacatgaaactgcatctaagcttattgaaataattgaggatgctactgtgctacttgaggaagataagaagcatgatgcaaagggaaatggctgtaggctggaaatcattggcaacatccttaaaagtatatacagagacaagggcaatggtcatgctgattcttatcgtgtaagcttggatctcagtgccttgagttgacagactcatgacagtggatg

SEQ ID NO: 14465 - DNA, 663 bp, Gossypium hirsutum
tttgtatggcaaaggaggagtgtaaaattgaatctctctatttataacattgtaaaaccatattttaatcggagagtagtaagcttgaaacaccttaagtgtaataatgttataaaaccttattctaaaataaaataaaataagtataattctatatgaattttacttttattttattttactcttatattttattttaataagtattcaggtcactcaattctaacattgagaaataaaaaaacacactaattgatcaagaacatgtttaagattttcatctataacagtaatggcatattgtttccaataggatcagtttagttagttgaatactcattagtattccaataagaatcaagatttgaatttcaccaacaatctcatttaatagatgatctgtaagtatcacttttatttctctataaatatcgacctgacctcagtttcatatcatttatgaagttggaaattttaatagatgttattaggatgaattgatggcacttattaccgtaacgtgaagcacaagtatttaagccgtcaaagcctaaaaacccttgttactttgtgaatagtgaaccccaatgaaaaacactaataaaagaataaaatgacttgacaatgagattcacagggaacaaacctaggatatggcctgaa

SEQ ID NO: 14466 - DNA, 652 bp, Gossypium hirsutum
cactgctttccaagctgctttagcttatgatgaagctgctaagaccatgtatggtgaaaaagctatcttaaacatgccccacggttccgataccactactaccacatcagcttcttcggagtctaccacggctacggcaagtgatgtaaaagctgaggtgagggaggaggcgaaagtactagcagaagaagatgagagcatgaaagagatggattatagttggcttaatggattggagtttaaggatgacattgcattgaattgtggagcgaataataatattagtgtgtgggatggtggatggctttttaacgaggatgattgttttagtatagatgagcttcttggttgacttgtgtccaacattttttttatacaattatttataaaaatctttataacacattaaatatgtacgaatattatgtaatatgacatttaaacatgtaaatacgtaatattaagaatattgaatgaaatataattgttggtaaatttcgagttagtatcattaatcaatagctatataatttatgaaaataataaattgtgtatattaaaataaaaatgtataaaatatattaaaattaaattttgattggatgataaataaagaagtttattatctagttggtgcgcgtttaaatcctaa

SEQ ID NO: 14467 - DNA, 361 bp, Gossypium hirsutum
ctatgggtttgggtttcgatcggttattggaacagctttcccagatcgaaataaccggactgggtcaacccgagaacccgccggcttcgaaatcggcaatcgaatcaatgccgacgattcaaatagaaaaagcccatgtttgttcggaaacccactgcgccgtttgtaaagaacctttcgagctcgggtcggaagcgagggagatgccgtgcaagcatatttaccatgaagattgtatcatcccatggctggcgcttcggaactcgtgcccactttgccgccacgaattgccgtcggatcggagcgagtcgaacgacgaggcatcagagacggtggggctgagcatatggaggttaccggg

SEQ ID NO: 14468 - DNA, 671 bp, Gossypium hirsutum
  misc_feature (455)..(455): n is a, c, g, or t
  misc_feature (626)..(627): n is a, c, g, or t
gaaatagttaataagaaagttaaacatactcgtatagataacatgactgttaacagtaaaagtactatagaggttcatgtattaggacttagattgtattttatcccgatttttttaaaaaaatagacaaattagtctttgtacattaaataaaaatgtaaattaattttttctataaaaaaattatttatttgtattgtaaaaaattaacatgcttaatggaacaattaaataatggtacatgacatgtcatgtatatgatgctttaatgtacaaggataaatttttaatggtaaaaattaataaaatttttaacaatatcaatttacgggattcttattataagaattctcataatatttttattctcaaattttgagcttatttttaagagaaaaaaaaatctttttaagacgtaaaaaattgtggcaagttttcagactacacactgccancggcgcattagtttagtccttgctttgactaaaaaaggcaatttggttctttaattttatactttaattttttcttttttagcctgaacaacatcatatttattttcttaagcatctaacaaccctttggtcctatttttttttttattttctaacctgggtgggtaaggnntttgggggcctatttttttttttgttattttcaaacctgggtgg

SEQ ID NO: 14469 - DNA, 461 bp, Gossypium hirsutum
caatcattggtctgagccactcagtggggtagagacatacagtggtcggttgagttggtaattttgtattttattgttattttagctttttctatttttgctgtttatattaatcaaaaattatttttcccttttaattttacaatttaattttttctcaaaaaagaaaacagttatgaatgttatgaattttgtccttcaacattgattatcaaattaacttagatttaaagtatatttttttacttgtagatgagtaatgatcaactacattgattattgaatcgtcacttgaagcttgctagttagattttaaaaagaaaaaacttttaaatagtttaatgatccgtttgtaattttttaaagttgagcaatcaaaatatgaatttaatagtttagtgacctttggccgaggtaataaaataaattaagtttttcagaatagaatcgatggtcgttca

SEQ ID NO: 14470 - DNA, 575 bp, Gossypium hirsutum
gagcaatgaaatgccaactaaagtcgttattatagtgttctgaggcttttttttgctttgccaaccataggcgggatgcttttgtgtcatttcatttgtgcttcttacataaaataagattaagagatggaagttcaatatgaaatttacgtctcattagaagttaacagaatagatttagagtatagttaagagttcaatcgcaatcatttttatttttatttttgtaatattcattaagtgggattcgaataatgaccaagttcattgttaaaaatagaaagcaaattaattttaaataatgtgttaggatataaagagttcaggttctgaaagagaattaacatctgatttaataataaaaaatcaaaagtaaaatttatccgaacttaaaataatctaaactcaaaattgatttgaattgaaatgatccaaaattttaaaaacatgaaacatgaatcgattcgaatcaaagcataattaatctcatacaaattaaacttgaaataatttaaaatcgatatgattcagataaaaaacttaaaatgattcgaacctgatgactcaatcctaaa

SEQ ID NO: 14471 - DNA, 610 bp, Gossypium hirsutum
cgatatcccccttgctctgtagcaaattctacaattaagacagaaaaattaaaacaagaacacacccattcactgacaaaacccaataaagcaaggaggtgaaaggtgccaaaaattgaaattaaactgaatggttttagaatcttgagaaccaaattccaatttcaaacgcataaagatttatatttagacaaagtaattcatattcattcagatacacaaataataactaaataaacgtgcatgatagacacttgtaagttgttcaaaatatcattaactgacaaaaacccaaaattctctttgcccattaaaacacaaaagaatatttgaatcttgaaaaattagacgcaaagaaaaccccatttcagataatctaaaaaaaacccagaaaaataattaagaaaaagattaaaagggtcaaagaacaattactgtggagaaatgggaaaagatgcttgtttacaaatctggaagcttcgggtccgccatgaccatcataaacaccaacataggtacctaaaggagatgtaaagacttggctttgatcttcaaggtttttattggcttgaacgacggcgattgagtaatcgcccgaagcatgaggttt

SEQ ID NO: 14472 - DNA, 669 bp, Gossypium hirsutum
gagctgcggaatgaaataaagcatgaggaagaaatattgaatctttgaacatatggaaatattttgaagaaaaaaagaatatcagtttccgacgattatgctaggagaatatgtaagatgtaacccttaaattcataaataataaatttgaaaacttaaaaaaaaacataataatataattatatcaacgaatctaggtaattagagaacgcaaattacgtgcaattttaaatttaaaatacttttagcacttcgaaaaattaggaaatcaccaaaatactcggctgaaatttgaattcaaaaaagtcattttcaaagtgagcatatgtatactacgcaactttgttcttttctcagtagccaaacagagtattaaagacagcgccagtgaaacgcttcaaaaccaagaaatgaatggttaaaattttaaaatcattttgacttttactgaattctatcaagtggctttaaaaaacggagacctgaaaagcaacgatctgactctgttggcctaaaacgttggtttttagtgaccacttactgatttccaaaacattcaaatttaaagcaaaaatggagggaacccctcaataatcattaaaatgattcttaaaaatcagtataaacaactcaaatttaattttgaaaagcgaaatgcagaggagatta

SEQ ID NO: 14473 - DNA, 461 bp, Gossypium hirsutum
ctatttcttctttacaggtttcagtgtcggcatgcaataaaaggcatagcattcaagacaccagaagaagaatgagaggttcattgacccatgatgaaatgctgtcttcctgtctcattaagaggcttgttatactttctatatgcatagatataagagttcatactaattgattgacaaagctgcaagtttgatggctgtggttgtaaatggccgattactgcactcaacttcagctttataacctgcaatctgaacttcaactttgtatgttatactgtcttcttgactcctccgttttgtagctccctagaatctggaaagttaaacattacttgaatataattatgcaaagggaatttatttgaacaatacctaacccaaatatttctttctgttaccaagggtaaagcataaaaaaaccaaaatttaaacctttgggcaaccaagaaggtgaaaaa

SEQ ID NO: 14474 - DNA, 1035 bp, Gossypium hirsutum
ccaatcttgaagaaaatggaagaattgaagaaaataaaagagaagagaaccagaaaaaaaactttgaaagagaaaatgaagaaaaaattgggattctattgtgtgttttgggagaagagaaatggaggataaaaatgtaaatagctagccaaaagcccttttggcttaggaaaagcccttccatctgaagaaaagcattttttttaagttaaaattttcattcaaccgatgtttgtttagcaatgctttggagtgaaaagtgtttttttagggaaaggttcttctcaaaagcatagctaaacgaacccttagagttatatctataggttgctctttctcctttgctaggaatggttctaccccctttgtgagtttcttgcttctctttacccttttccggatcttggactagaggctctaaatttccagtaatcatcatactcagctctatgagcttgaatggctaaaccttcaaaggtctttggcttaatgctactttcttcaaggcattaagccaaagacctttgaaggtttagccattcaagctcatagagctgagtatgatgattactgaaaatttagagcctctagtccaagatccggaaaagggtaaagagaagcaagaaactcacaaaggggtagaaccattcctagcaaaggagaaagagcaacctatagatataactctaagggttcgtttagctatgcttttgagaagaacctttccctaaaaaacacttttcactccaaagcattgctaaacaaacatcggttgaatgaaaattttaacttaaaaaaaatgcttttcttcatatgaaaaagctaaaaaatttagcttttcctaagccaaaagggcttttggctaactatttacatttttatcctccatttctcttctcccaaaacacacaatagaatcccaattttttcttcattttctctttcaaagttttttttctggttctcttctcttttattttcttcaattcttccattttcttcaagattgttgcctctctctctctctctctctca

SEQ ID NO: 14475 - DNA, 486 bp, Gossypium hirsutum
acactacaagtgatccatcctccattctcctcttgctcgactcgtcgactacttgtcttcttttgttcaaaacatataatctacatcagtagaagatcaatctctgtactttgtactctaacttttttttaaattaattttaaccatttgggttgtcacaattttttcaatgaaatcaagaaaacaataatgcattaccgaggcaccaatcaactttaatgataatcgattcaccaattctgaagtagagagattctatctctagatgagtgtccaatcattcattcaagaatgtggattcgaccccaccgtgtctacctacgacgagatatgggatttggtgcattaccaccgttagaataaattttgcaccacaccaaccgaactagtggttgaagtaatagtttatggattctatgttgccctaaaggatcgataaaatcatagacagggtgaaatgattacctaagtcaccattcagggaaa

SEQ ID NO: 14476 - DNA, 560 bp, Gossypium hirsutum
tttttttggggggcctttatcctctaatcttagttctagtttgtcatcctcaacctgttgcatataactactttctaatgaaaaaaaagctttttctggtgcatgaggactgctcatggtatcttattgtgtgttttaatttaaaatttaaacattgaagtaaaaatttgtgtatgttgatgctatttctccaaatttgattcttggcttgtacaggtcatgattataagatgtcctctaagttgcatttatttttctccccatattgttgctggcattctctttgagttctagaatacagtggagtttatataactaagaggaaaatagctaataacatgatatgttccttttgccctggtcttgcttgtaaattgtctagaatagcacttggctcagagctccatcaagtgtgtcaaataagtggtcatgcatttttaattcactcgttggtgatctgacagtttgttgattggatgatttttttttttggcccaaaaggattggaaggtttaaaaaaaaaaccttcccattcccctccaaaaaaacaaacaaaataa

SEQ ID NO: 14477 - DNA, 675 bp, Gossypium hirsutum
taaacgtaatgccaaaccatagccttgaataagggtactaaaataaaatatataaaaaagttttttattaaattattttcaaataattttaaattaaaattgaataacaaaattaagtaaaaaacaaattttaatggaaaattcaatcagtaacaaagttaaagtaacaaattcaatataaaattagagtataatgataacttttatctttttataaatataatgacaaaaattaaaataatataatggtaattttcaagtttgacctaattaacccaaaaaaatctaaatctatttatttaggatttatgcttaacaagtttagtcataaagcatatacaaaattaacccataactaacaattaaattgagtttttgataactataagttaaaaaaactaaatgtaacatctttcatccattttcgtcattgaattaaggttatgatatgctacggtaaataaacagtcaagaatatgtaatttcaattcaaaaattcaaagaattaatcattcattaatagataaagattcaataaacatattattcatacaagatagggacctaaatcaaagttctgaaactctaaaatcaatttggaaacaagtatggactaattcaaaacaaataaaaaaataaggtgaaaacaaaaaataggaatcacatgaccgcgta

SEQ ID NO: 14478 - DNA, 645 bp, Gossypium hirsutum
ggatagaatttgaaagtatggggtcgaagatttgagagctacagtagatgataatcctgagagagtcgagttttggatagagaatacgattcaagtatttgattagttatcgtgtaatcctgtaaaatgtgttaaatgcaccgtatctcttctgagagatactgcatatcagtggtggaatactttagaatctgtagtgtcgagagaatggatcacatgggaattctttcagaccgagtttcgaaagaaatacataagtcagcggtttcttgatcaaaagcataaagagtttttagaattaaaatagggccgtatgactgtgactgagtacgaacgagaatttgtaagattaagtaagtatgctcgggagtgtgtttatactaaagaaatcatgtgcaaacggttcattgatgggttgaacgaggatattaaacttctagttggaattctaaaattgaaagaattcgtggtgctaattgacagagcctgtaaagcgaaagaacttggcagggaaaagagaaaagttgattcagaggcaagagattcgaagaagaggtcgatgagtaaaacttattactcttcgtcaaagaaattgcaagatctgtatagctgttcgaatacttcagtggggtatccaaatagaga

SEQ ID NO: 14479 - DNA, 380 bp, Gossypium hirsutum
ttaaaaaaaacgattcgtaactattcttcttaataaaatggttttcaagatatttaaaattatattcaactttttaagaatacaatatatattttactattaaatttaacatgtatcgataattatttaatgatatatgaatataaagatttatggtgattggtgataaaactagtactattccataaaagaagaagagtagtgggcatataaaaataaataaagaatggtcattttcattttatatgaattttcgtgaatatgataatagagttataaattttagtggagcaagtagcaagatgttttaatgaagccagagctatgtgaaattctttgggtgtaattggaggattttgaatgatggcatgcagtttgtg

SEQ ID NO: 14480 - DNA, 648 bp, Gossypium hirsutum
tgcatgaacccgtctaacacttttcaagcagatccaatcaaacaaactggatccaaatgaaaaccaattaaaaaaattaataataaatccaacaaacaagaagctagaaaacgcttagaactatatatttaaacatgaaggaatccatgccaacttcactacaatccgatttacctcaaccgtagcttactgcctaacctcaacgtgaaaatgatacaattcaagcgtgcataaacaatctttaccgaacatgtttccaacatttcatacgtaaatttacattacgaaaccatacatcagagatccacatcttacacctcataatagcaacacagtaacaacaatttttgtataacaaatgccacaaataaacgtaagtcataaatttctacaagtcaatggcaatccctaatctaacaacaaaaaactgcccagatctgaatcaaattaaaataataaaattacacgaaaaattaagaaaaaaagaattaaaatgtcactgttagggttaaaagtagagggtaagaggagaatagaatgattaccttgtgatctgactcagaagcgaaaaccggagaaaagaatatgaaaacgacaacgaaaagagataaggttgaacgaacagtggagactacggaagatgacatg

SEQ ID NO: 14481 - DNA, 551 bp, Gossypium hirsutum
tcgttactgtagaacagagtccccagctattcgataaaggtcccaatctgtgattgtgccctggctatagcctgtcttctttacgtttgcaagaattttagctttcaagcatagaattgttatcgtaaaaggaaagatagttgggccagaacgtgaacgtctaacgacacaattccgcatttctctcaggatgatttttcccacatcaatggtctttctagttaaaattgattataataagaccattcactctaatgagattgtagtcccatgtgagataggcataaggctgaatcggatgaagtagaaccatgcctttgcgagtggtatcaaatattcttttcgacaagtgtggattccttgctttgacacagtccatatagaacctagaactgtaagttcctcgaaaatttcttgcaaatttttcaactctatattgctcatcaaggaagaatattcattgttttcgaaatcaggcaattcaaagaactcattaatagcgtttgaagttattggtaccttgatttcgtgaactagaacttccgtcaaca

SEQ ID NO: 14482 - DNA, 691 bp, Gossypium hirsutum
gcatcatggttgtcttgtcagtacaaatcaagctttactttttgttatttattatcctttattatgatgttgtttttctgggttgatgtggtatctaacaaatataagtaattgggtggcagacttcatccatcattggattctcaaccttttattttcaggtatgctacgaggatcatgtctcattcagttaatttggaataataaaataaaaaagaaggctagccaatagtggggtggggttcctacttacagtaaatttgaatagacagtcacacagggagagatagaaagagattctgaggaagatgagcggaaggaattgatgctgcggctttgaaagaaagaaaaaaattagaatatgtatgaaaaggttaagtttgtgtctgattacatgcatcaatccccacaaagtaggtttattccccctttaccacatttaattaattccatttaaagaagcaacaaaggggctctactcaactcacaaccaaacacctaacttcatccacatctatatcttccttccttttctttgaatcaatcacctttttctttttcagcaacacccttttctttcatacttggttttatatatatttggattccccccttcttgctggtaatagaataaatgacttatcttctagaaaaaggaatcattagtaaaggaagacgtggttgtatttgc

SEQ ID NO: 14483 - DNA, 397 bp, Gossypium hirsutum
tatgcttaaattattcatagtttctcattaactcataaataaaaaggtaatgcatttcgcgcatttgaacccacgtcctcttatattgacaataatactcaatggcggagccaaggggattggtaggtccccaacccccttaaaatagaaaatttctcatttaggctatttataatttataaaattttaaattagtaatggtaaaattacactttggcctcccaaaaataataaaaaatgaatttaatcctttaaaagttataaagatatagtctattaaaatggtgaaattgtatttttaccatcgtaaaaatatacaatttaatttcgaccccctaaaaaaaattttctgactctaccactgataatacctatgccaatcgagctaagactcaaa

SEQ ID NO: 14484 - DNA, 701 bp, Gossypium hirsutum
  misc_feature (410)..(412): n is a, c, g, or t
  misc_feature (420)..(420): n is a, c, g, or t
  misc_feature (437)..(442): n is a, c, g, or t
  misc_feature (444)..(445): n is a, c, g, or t
  misc_feature (449)..(453): n is a, c, g, or t
  misc_feature (468)..(475): n is a, c, g, or t
  misc_feature (483)..(486): n is a, c, g, or t
  misc_feature (488)..(488): n is a, c, g, or t
  misc_feature (491)..(494): n is a, c, g, or t
  misc_feature (504)..(504): n is a, c, g, or t
  misc_feature (506)..(515): n is a, c, g, or t
  misc_feature (517)..(517): n is a, c, g, or t
  misc_feature (522)..(527): n is a, c, g, or t
  misc_feature (533)..(534): n is a, c, g, or t
  misc_feature (539)..(541): n is a, c, g, or t
  misc_feature (545)..(550): n is a, c, g, or t
  misc_feature (569)..(573): n is a, c, g, or t
  misc_feature (575)..(575): n is a, c, g, or t
  misc_feature (577)..(577): n is a, c, g, or t
  misc_feature (579)..(582): n is a, c, g, or t
  misc_feature (584)..(593): n is a, c, g, or t
  misc_feature (595)..(595): n is a, c, g, or t
  misc_feature (605)..(607): n is a, c, g, or t
  misc_feature (612)..(613): n is a, c, g, or t
  misc_feature (619)..(622): n is a, c, g, or t
  misc_feature (629)..(636): n is a, c, g, or t
  misc_feature (638)..(643): n is a, c, g, or t
  misc_feature (646)..(649): n is a, c, g, or t
  misc_feature (651)..(651): n is a, c, g, or t
  misc_feature (653)..(655): n is a, c, g, or t
  misc_feature (659)..(664): n is a, c, g, or t
  misc_feature (666)..(666): n is a, c, g, or t
  misc_feature (668)..(670): n is a, c, g, or t
  misc_feature (675)..(691): n is a, c, g, or t
  misc_feature (693)..(696): n is a, c, g, or t
aacaagtttcctcttacaacaattccatatagattccacattattaatcccttccacatatttatgaatctttcatgctctacactaatgctaatttcacacacaaaatgggcaccaaaagattaaaagaatattacttggagttacctagattcaacagcatgtgtttcagagcccctaagaaaagatctgcgccaccaaatctggaaggccttgctcagatttggacattcactgccattcctcgagaaacatcggaaccactccataaacagaacatactgttgcttcaaaggaagtgtaaggagggtctgacccattgcttcctccaatgccttcatgtcaagtccctttctgcatctttgcagccaaccaaaatccaatagcattggcccaaaccatgctattgnnntttggtcngaggggccgatgatgtnnnnnntnnttannnnngaaaagccacaaccnnnnnnnncttaaatnnnncnttnnnncctactcaanannnnnnnnnncncattnnnnnntcttcnntcacnnnaccnnnnnnttactcctagaatcaggcnnnnnangncnnnngnnnnnnnnnntnattaaaatannncctcnngtcaannnnaaaaatnnnnnnnnannnnnnttnnnnantnnnttcnnnnnncnannntatcnnnnnnnnnnnnnnnnncnnnntcgtg

SEQ ID NO: 14485 - DNA, 469 bp, Gossypium hirsutum
ttatgtcccattcctggtttggtatttttccccctataacccttttcttaatgaatatttttcatttgatctctgcaaatgttagttcatttggtgctacggttatttattaatcttcaattttgtatttgttcatctgggtattaagcaagttatgttaatttcactcagtcattggttttggtttcataggaagttggcttacagtcaattgtattttgtttaggtaacgatggaattgattttttgtaggcattttatattgatgtttagaaatttatgttatttttagatttataggaagtgaagtaatggttaattcaagttattttcggttaattatatttgttgggaatttctcttcaagttcttatgatggagtgagaaagtatatgtaaggtatttggcccagattgttattattttagaagaaatgaacatggatattcttcgtgaaatgcatggaatg

SEQ ID NO: 14486 - DNA, 394 bp, Gossypium hirsutum
ttctcgtggtagacctcccaaaaatatgggaaatgtaagtggcaatcagagagggacaaaagatacagttgctagattagaggctcgtgcacttgtcagaacctatgctatccgagctcgtgaagaagcttcatcgccagatatgattataggtacatttactctttatgatacttctgtgattgctttgatagatcctgtatcaacacatttgtatatatgcatgaacttatagaacagtaagacttttcctgtacagtctgaatttgtaattagagttttgaaccccctggatagatgtgttttggtcaataaagtctgcaagaattgtcagttgatcttgttaccttttaatgaatttgatataattctgggtatggattcgttaactttg

SEQ ID NO: 14487 - DNA, 429 bp, Gossypium hirsutum
gactttatagtttggcaagaccgattaggccatcccaattcaattattatgcaaaaaattattgacaattcaggtggacattcattgaagagccaacaaattcttcaagctaataatttttcatgtgatgcttgctctcaaagaaaattaatcattcgaccatcaccaggcaagataaattatgaatctatcaattttctagaatggatacaaagagatatatgtggaccaatacaccctccgtgtggaccatttagatattttatggtttcactccatgtttcgattagatggtcgcatatatcattgtgatcaacttgcaacctggcatttgcaaggttacttgctcagttgatcaaattacgagcacatttttcaaatttccttatcaagacaattcatcttgacaatgctggtgaatttacttcc

SEQ ID NO: 14488 - DNA, 650 bp, Gossypium hirsutum
gtgacttcactagctaaagtggaagaaaaaattagaaagatgaaaattgaagaaatagaaaaatggaaaatataatttttttccccataaatgtgctttgtaggaaatataaaaagatttccattgcttggtgtgcataattttctatcatatgtgtgcataattttaaaataaaatacacacatctctcattttctcctcttatcttttcaattttaatttagaaaaattaatttttaaatgaaaaataatcacccacccatccaagcacacccaagttccataataaccaacaataaaaattggacactggaaaattttccgggttcattgtaacaatgtcttcaacaccaccagcacactgataacagattgaagaaacaagaggcatgaaggaaacaaagcaatcaaacaatgaacttttattctaggcaggcttaagcatttggttattcatgcattcgtgaatcaaaaagcaagatacagattcaaaatctgtgtgaccttgcttaagttattaagatagaggatggacttagaatccagagacagttcaatttatagacactgaacaagcttcgcttttcattgatggatttatcaaagagatatatatcgagatactttgcctcctgactctttcacccaat

SEQ ID NO: 14489 - DNA, 633 bp, Gossypium hirsutum
atcctcctcttagtcttccggttcttccggtgaggagtaggtatatctttactttataggttacggggaaaaattttggctttaatttaatgactcctcaatgagctctcaggtaacctaatcaaaaagcagacggtccatacagaagtttagttttgaggagcagcaattcttcccgcatctatcaattccattaccttatccttgcccatgaggttccaacatttgatccttaattgacctaggagtttttccctttcccgggcatcctcaaaaaaaaggtttttaaacaccccaaccccatcccttagaaagaaaaaggtagccccgaagaaaggaaagagcgagatggtggtttttgttgttcccgcgaagcgaagatcattcgccaagcgaatgaagtgggtcaacctcttttttttttcggccaaacactttttctcgctggtcgagctttctacaaaaaaagcgatgcgagaacgtattctcttatctaagctttttccctgtgcattcgctctccccatcgtagatggttcacccccgcccggggccccaaaaggatggaaaactacaacggggccaaaaggaattgggttctttctattcaataagtatggcaggaccaaataa

SEQ ID NO: 14490 - DNA, 554 bp, Gossypium hirsutum
agggagctcttcctcttaacttcttgttcttcaattcacttacttccagttcttggctcacttggttaaatccatttgctacataccacctttagacaaatctaaataaaagatataaaaatccaaatttcatgaatacccaaaactactgaattgactaaataagaagaacatgaagaaaagaacagaagtatttaataaaaagcctcacttaatgcatacatatcttagaattcataaaaacagaggtataaagatggcatctttgtacatatctcacttaatacatacatatcttagaatcctcttatgtacatacatgcatgcatacatacataacacatatacatacattttaccaaaaatacatacatacatacatacatacaatcctatgcatatgttctcatatacactacctgtacacttctagccaaaggattatgatcacaagcaagcagcacaacaggtaaaccaacacaatttcctgcaaaacaaaaaaagtccacggacctcgtttccaatactcgagttgagaagaagctaaagcataa

SEQ ID NO: 14491 - DNA, 554 bp, Gossypium hirsutum
ggattgggaatatcaaagtggatgcaaatgtttattttatgtctcatattatatataaaggcatttcatggtactcgatgaagatatatatatatattggaacgaagtgttaatggttctaaatttcgttgttttggatggaagtagtcttacacagttcacatttataataattccaaatgggtatagacattgggattattgggacatgtagttatttgttgggtacttggtttccacacttttttttaattgaatattaattaaatttattatcgagcctgatcaatttgagatattgtttgtaggatgtcgagtttcttaatatttgaattaatcttttttttatacaactcacatatgactggtgagagcaaattactatcaacacatatcataaatagacaattcttgcgactcaaatcaatgatatggataataaggtgaacacccttaaccaatggatcaacaaaggtggttctcaaccggacttttttaatactcaaaagtcaaaatatgtggattcaaatcatggtagtcggtatcgtaccgtt

SEQ ID NO: 14492 - DNA, 423 bp, Gossypium hirsutum
tttcctgccttcatgtgggatttttgcataaattaggttaattgcctctgtatgctgcctggacttgtagctttttgccttactttgagatgctgcttgtttgcaccggtacttacgcttgggttgctaaatttataactgaaatgtagtttgtgggagttccttgaacccaagatagcaacactggtatttctatcttcatgtggtacttttgcataaattaggttaattgcctctgtatgctgttcagacttctagcttttttctttactttgagatgcttcctgcatgcattggtgcttaagcccgagttactaaatttctaacttaaatgtagtttgtgggcgttccttaaaccttcttcattttcttttgtttgttaggccattccacatgccgtagcaacgataagagctgcagaca

SEQ ID NO: 14493 - DNA, 655 bp, Gossypium hirsutum
aagcaagcttcgaagtgttacaaaagaagctgagaaactgataaatgttactgttatttttattttatttttattttttccccgaaaattttaatattcttattatgaattatttataatgccacatgtttatttttagttaaaatatgttgctagtccctatactttgaaaaaattcaagatttagtccctatacttaaaaagttagaaattaagtcctccaagtattttgatttaaaaatctatgtccaattattaaattcgtaagcatttttatcaaaatttgtcaatttgagatgttgattaagctgctcttgtgtgacttatcttatgattaatggaaaataaacattttaagttgacaaattttaacagaaactaccaaccgtaataatgattggactagaatttttaaattgaaaaagtaggagaattgaatttttaacttttaaagtataaggactaaatctcaacttctatagaggtagattagggtttgtagccaccttgctgcaggacagccaattcagtccaaactagtagcttggcccaatctctgatctggaacaaaatgaaccaagagttttagtttggtcatccaggcagagatgaagggaactaacctctgaaactctattgctaacaggcaccattg

SEQ ID NO: 14494 - DNA, 638 bp, Gossypium hirsutum
  misc_feature (569)..(569): n is a, c, g, or t
  misc_feature (571)..(575): n is a, c, g, or t
  misc_feature (578)..(578): n is a, c, g, or t
  misc_feature (580)..(581): n is a, c, g, or t
tgcattaatgcatccttccccgctctctgtattcactggggtcatgagtttgaacccccttagaggctggggacaaaaccttgaggggcatctaaagagtacaataccttttcctaatcgaacaggattaatctcattaattgttttgaaaacttgtgtagagtccttgagcacaatagcttctcaggaaatttgcctgctacactggggaatttacccaaaattgagaaactgtgagaggctcatcctttctaaatttttatgaaatctttcatttatttccatcttttcatatccctgaataatttttgtattgttaattgttgttgttttaattttgcaggttacttaattccaacaattttattggtgaattgcctgaaacattcgctaggctgactacgttgaagactttgtaagcttcatattcatctattctatatatgtcatcctgaattgattcatggtcttaatttcatgctccctaaactgtttacatgctaattttgattattatccttttccgatagccggatcggtgacaacaacttcaccggaaagattaaaanannnnnggnanntgaacagatggaaataaatgaaagacttcataaaaatttagaaaggctgaggattgc

SEQ ID NO: 14495 - DNA, 355 bp, Gossypium hirsutum
acctgtgggcacgatttgaaatgaccaaacatttaaagacctttatgaatttgattcgattacttgttaagacattaatttgtaaaaggtcatgttcgtttgattgtgaaaatggtttattgaatctaccttcgtgtaaaaatcatgcttgtcttgatcgaaagactattggatttcatgtctatttggataaattcgtatggcatgctgattctaacttgactttaagtcttatgtattctttgttgccgaatatgaagagccatttagaaaagacttacgagaaaccattcatcccattcgtccaaaaaggttcgagtaggaatcaatgtttccaagtgaacaaatgactcga

SEQ ID NO: 14496 - DNA, 516 bp, Gossypium hirsutum
gcgggtcagttcatttttgtgtcatgttggtttcgaatggacccaagtcagttcatttttgaaatttttggacaatttaggtttaggtcgattccattttcttacttttttccttttaaattcaaatcattttattttactgtagatcctttttaatttaaggctcaggttttttttagatcctttctagttatttgcttaaattattttgagtttaattatttgaagtattgatttggattaaattaacctaaattgttattttttatgattagattaattaaattcaagttggttgagtcaaatttttaaatttaaataatttattcagtttgttaaagagagacaaaatcccaacatgaaaataatgcataccattattgttaacattatgattaatggcagacaattttaatggaaaacaatccaagtggtgcaagtttagcaccctaaagttgactttgaaaaagtggcatgggataatttttttttggtccttgagataatgggctattt

SEQ ID NO: 14497 - DNA, 576 bp, Gossypium hirsutum
aaaaacttccaaatcaaactaaaagaaacaaaatcaattaagattttccatttttttgtaataaactcaagttcagatagtaagtaaaactgagctcaaatataagcgaaaggtaaaagagataaaagaaaataaaaatggcgtacgtaagtgtttagttgcctgacgaagcttgagaagttgttatgcttgaaatacttaggcaaaagatcccgtgcgaactccggcgggttccaaacaacgaagctattgttagatgggctccaagaaactatagcatcggtagcaggatcatccaccatatcgtaactcttactcaggaaaggaggtggagtgttaacactttgcaccggcaccggttttggcgccgtttgaggttgcgccgtcgtttgagattctccgccgctcgtcgacgcatcgttttggctgtttccactgctactcactccatccattcgactttaccggcttttttataattaaaagaagtgaaaatcaggaaaaaaaaaaccaaaaaaggggcctagggttttaaaaaattgttagtttggccctttggaggaaacttggaaatta

SEQ ID NO: 14498 - DNA, 638 bp, Gossypium hirsutum
  misc_feature (52)..(54): n is a, c, g, or t
cttttggtgctttcccccacatctattttatcgctcctcactacgttttcannnctttcaccggtcatcactatatctgagaaggttttagtggcacttaccaacatatgattgatgaatggagctttgaaagtgttgacgaaaagcattatggtttctttttctaggagaggtggctagactgtatagcgacttccctccacctttgagcatattgcctgaaactctcattttgtttcttctccatgttctgcaaagtgattctgtcaggggtcatatccattacatgactatactgcttcataaaagcttgtgctaggtccttccatgaattgatctcggtatgactcaattggttgtaccaattagatgctgccccgaccagactgtcttggaagcagtgaatcaatagttgatccttattaacatatcttgtcatcctccagcagaacattgtaatgtgagtttcatggcagctagtcccattatatttctcaaactccagggtcttaaaattgggcggaagcactagatctggaaccaggctcaagtctttagaatcaattccatagtggtaatcagtgctttccaatgccttgaatttctcttctagccatctgcatcggtctgtaagttgt

SEQ ID NO: 14499 - DNA, 657 bp, Gossypium hirsutum
acattgcagagccagtttccctcttgcatccacatgctatttggatggtgagccacaattacatggtccttccccccaaatcgcttccattcattctgtgcagtcaggaacttaactaatttattctgcaacattttattaacactaactttctcctttcctcgaagcttggaatgccgattgtaactaagagatgcaaagaatggcacaaaaattatgtctgcttgactcgagtttgtgactctgattgcagcgcaaggtctgaccacattcggtgtgttcgaagatagaagatctagggtaagccagtactcgatgctatgttgcagattcaaccctccagggtatgacggaattctactcggatcgtttacctcaggccacacttgattcaattttcctttccaacccagcaatccaaagtgaaattcagaaggcaggtcatacatatatacccttaaaagggcctgattggtgtcacaggactcaatagttgggtgccggtaagcgcacattttcttcctgtaaccggacttatgacaactagaatccccacttcttaccagtgtttgagcatcaacttttgaagactcagatgagaagaagggtaactttagctcatttttgacatttgatttcaagtaaaccgtgccattg

SEQ ID NO: 14500 - DNA, 1234 bp, Gossypium hirsutum
  misc_feature (649)..(649): n is a, c, g, or t
  misc_feature (657)..(698): n is a, c, g, or t
  misc_feature (700)..(706): n is a, c, g, or t
  misc_feature (708)..(716): n is a, c, g, or t
  misc_feature (719)..(719): n is a, c, g, or t
  misc_feature (729)..(740): n is a, c, g, or t
  misc_feature (747)..(751): n is a, c, g, or t
  misc_feature (753)..(753): n is a, c, g, or t
  misc_feature (762)..(770): n is a, c, g, or t
  misc_feature (774)..(776): n is a, c, g, or t
  misc_feature (780)..(785): n is a, c, g, or t
  misc_feature (788)..(790): n is a, c, g, or t
  misc_feature (792)..(792): n is a, c, g, or t
  misc_feature (794)..(795): n is a, c, g, or t
  misc_feature (798)..(800): n is a, c, g, or t
  misc_feature (803)..(807): n is a, c, g, or t
  misc_feature (810)..(820): n is a, c, g, or t
  misc_feature (822)..(822): n is a, c, g, or t
  misc_feature (826)..(833): n is a, c, g, or t
  misc_feature (835)..(837): n is a, c, g, or t
  misc_feature (839)..(857): n is a, c, g, or t
  misc_feature (860)..(861): n is a, c, g, or t
  misc_feature (865)..(868): n is a, c, g, or t
  misc_feature (870)..(871): n is a, c, g, or t
  misc_feature (873)..(893): n is a, c, g, or t
  misc_feature (896)..(901): n is a, c, g, or t
  misc_feature (905)..(906): n is a, c, g, or t
  misc_feature (915)..(918): n is a, c, g, or t
  misc_feature (924)..(930): n is a, c, g, or t
  misc_feature (935)..(942): n is a, c, g, or t
  misc_feature (947)..(948): n is a, c, g, or t
  misc_feature (951)..(956): n is a, c, g, or t
  misc_feature (959)..(966): n is a, c, g, or t
  misc_feature (973)..(980): n is a, c, g, or t
  misc_feature (982)..(993): n is a, c, g, or t
  misc_feature (1004)..(1007): n is a, c, g, or t
  misc_feature (1009)..(1009): n is a, c, g, or t
  misc_feature (1015)..(1023): n is a, c, g, or t
  misc_feature (1025)..(1030): n is a, c, g, or t
  misc_feature (1032)..(1045): n is a, c, g, or t
  misc_feature (1049)..(1050): n is a, c, g, or t
  misc_feature (1052)..(1056): n is a, c, g, or t
  misc_feature (1058)..(1066): n is a, c, g, or t
  misc_feature (1069)..(1079): n is a, c, g, or t
  misc_feature (1082)..(1088): n is a, c, g, or t
  misc_feature (1094)..(1098): n is a, c, g, or t
  misc_feature (1100)..(1101): n is a, c, g, or t
  misc_feature (1105)..(1111): n is a, c, g, or t
  misc_feature (1117)..(1122): n is a, c, g, or t
  misc_feature (1125)..(1126): n is a, c, g, or t
  misc_feature (1129)..(1132): n is a, c, g, or t
  misc_feature (1134)..(1134): n is a, c, g, or t
  misc_feature (1137)..(1137): n is a, c, g, or t
  misc_feature (1139)..(1147): n is a, c, g, or t
  misc_feature (1150)..(1154): n is a, c, g, or t
  misc_feature (1158)..(1158): n is a, c, g, or t
  misc_feature (1160)..(1190): n is a, c, g, or t
  misc_feature (1192)..(1201): n is a, c, g, or t
  misc_feature (1203)..(1206): n is a, c, g, or t
  misc_feature (1209)..(1211): n is a, c, g, or t
  misc_feature (1213)..(1219): n is a, c, g, or t
  misc_feature (1221)..(1224): n is a, c, g, or t
tatatcattccgtgggtgtttgcattggtgaagtttatttttattgtattttatttgtggttcttacaatggtacctgcatgttttatagggcttagaggctgctcttgacaaagttgtgcatgttgaagatggtaaaaagatcacaaggtatggactaaaatattttgcctaaattttctgtcttgattttctttccttcctttgtatattgttgcttcttttcatgattcttgaaactcttctttagagggattgaccttgagagcatgagtattggtaaacgtgatgcactactagtgttccgcaccctttgcaaggttggttcttttatcactaattattcttgccattttgaagtctctgcttgcattcccttcatgaaatgttttatcttgcagatgggtatgaaggaagatactgatgaggtcacaaccaagacacgcattctctctcttgaacttctgcaggttagttttatgactttattttaagctttgtaagaacgctggtttgttgtcttttcataaaagaatacagtgtttgcccaactaaatggggtcatatttacaaatgcttttttttttaattctctgttaatatgatatttttgctattttctttctctggggaaaaggcatctatgtacnttcttggnnnnnnnnnnnnnnnnnnnnnnnnnnnnnnnnnnnnnnnnnncnnnnnnnannnnnnnnnacnaaccccacannnnnnnnnnnnaaaacannnnnanccaaccccnnnnnnnnncccnnncaannnnnncannnanannacnnnaannnnnaannnnnnnnnnncnaaannnnnnnnannncnnnnnnnnnnnnnnnnnnnacnnaccnnnnanncnnnnnnnnnnnnnnnnnnnnnccnnnnnnaacnncaccacacnnnnaaaccnnnnnnnaaacnnnnnnnnaaacnnaannnnnnccnnnnnnnnacaaaannnnnnnnannnnnnnnnnnnacaaaacacannnnanaaccannnnnnnnncnnnnnncnnnnnnnnnnnnnnccanncnnnnncnnnnnnnnncannnnnnnnnnnccnnnnnnncaaacnnnnncnnaacnnnnnnncccccnnnnnnccnnccnnnnanacncnnnnnnnnnaannnnncaanannnnnnnnnnnnnnnnnnnnnnnnnnnnnnnannnnnnnnnnannnnaannncnnnnnnncnnnnacccccaacc

SEQ ID NO: 14501 - DNA, 563 bp, Gossypium hirsutum
caaattccagacatgtaaaggtgcttttaaatactcttgagtttataaaaaaatagaaaaaaaatattcatagaattaaaataataaattatattaatcgttattaattcgaccaaaatcgagttgatgtgaattgttaattatattaatcagattagtatgggtattgttattaatgtagtaggacgtgggtttgagtgcgctgaaacgcattattctcctatttattggttgatgacgggctatggataatttaggtattatcccaaaaagagcagatataatcacaacctttacataaggtccaagttgttgatatagtaagtatataagtatttacaatttgatccccttattttatatatgctatgcaatagatttaagctaatatttattgcccgaattgacaactaaaccaatctaaggacatgatcgatataatactaatattttgagaactcaatgaatacatatcaaatccaagttgtcacatagcgggaatataaatgtttacaattggatccatttgttttaagtatgctcctaaacagatttggagttga

SEQ ID NO: 14502 - DNA, 360 bp, Gossypium hirsutum
aagtaaaacttgaggcatcgcgcattattagaaagcgagaggtaccttatcccattcatctctcaaatatatgtgacctcgcaatctgtttccactgaggttaagcttaagcagagaaaccatgtcagtgaatgatgtaggaattgagccaacaaattcatcgctcgctagactaaattttttcaagcatttgcaagtgtgaccgatgtttaaaggaagttcacctacgattttgttgttgctagcatcaaatatcaaaccatctaaccttagacaaggatcaaaagaatatacagaaaacataattcaacttagcagacaaagtatataaagaaataataaagggaggaactgagccag

SEQ ID NO: 14503 - DNA, 714 bp, Gossypium hirsutum
  misc_feature (635)..(660): n is a, c, g, or t
  misc_feature (663)..(681): n is a, c, g, or t
  misc_feature (684)..(686): n is a, c, g, or t
  misc_feature (688)..(688): n is a, c, g, or t
  misc_feature (690)..(692): n is a, c, g, or t
  misc_feature (696)..(700): n is a, c, g, or t
  misc_feature (704)..(706): n is a, c, g, or t
gatttttgggtcaaaaaatacggtgaaaaaatatttttctacttaaatgcaaaaattgggatagaatcacttttaccttttggaagtgaaagttatcaaaaatatcattatttatattaattatttaaaaagtagataaaaatagattaatttatattttgtaccattatattaaattatttaaatataatttatcattgtattaaattatttaatataatttattattatatttaagtttttaaaatattttatctatcattatttttataaatactttatattaattacttaaaagtgttcaaaatttatacttaatgtaccattatattaagatattaaaatatcatataatttaattaatttttaattttttacaggttgagttttaacttgattgacatgggtattattatcaacctaggaatacattgttcaactacaatgaagtataatatcattctatttatgagttatgatagccagcattttcaaaagcattaaaaaaacactttcaaataccacttttaaccacaacaattgataactagcacttaataagaggttacttaggagtagttggtaaagataatttgcggtggacattgacatgagaacatgccaagaaagtcaannnnnnnnnnnnnnnnnnnnnnnnnnttnnnnnnnnnnnnnnnnnnntannnanannnaaannnnnattnnntattatta

SEQ ID NO: 14504 - DNA, 657 bp, Gossypium hirsutum
ctcaaactctcctcccatatttcagatattctccttcatcttctcccacagatctgtaactttctctccttctgttcccatatttcaggtaatggcgttttttccttatttgatttttccttcttttaacgtttctcctctgtgctttttgatcatgttcttcttctttttttaattgattgtttgcttaattagcatttctattccctctcctctccaccgaatgctgattcgttgtttaagaaaatcaattttacccccatcaatttctcgcctaaaaaatgctcagactcagcctcaccgacagccactcccttccttccttcaactccggtgagggaaaaacaggcaggtagccaagcaagcatatgaatatttgagtgatgttgcgtcttccttcccacaatcaacgcttccatctcctccttcgcaatctctcctcttttgcctcccaaactactattttcgtgacctccaaacaattcctcaaaaaccatccccaaaaaccattctttcttccctctaaacaatccctctaaatgcttccttccctctctttcttccaaactcatccccaaaaaccattctttctcgcttaagattaatgggttttcttctcttccttctcccagtgtttcttctccctctccaaaaaaa

SEQ ID NO: 14505 - DNA, 610 bp, Gossypium hirsutum
ggcatcttatttgttctaggatctttttttttggcagtcgtcgttatcttatgtattagctttcatcattcttatttaaccttttaatgttcactagatatctttacatctgtagtatttctttctattgaaccttttgcttaatgaactatattgctaaagtagtaaatttgcatgacaagcattttctcatggtatggcgaatgatttaatcacactctaattttataatactttgttttagtgtgagggcaattgttgctttaaatcttcataattacggaagtgggcgaaatccatggggtaagctaaaaccagagtatttggaaaaggtatgatgcatttcaagttatctaatgttcattcatttacagaaaaaagactatctgttcacgtatcaaactgtttgcttgtgcttgatgtttgaattgggattgcaaaaagctgaggaatataatttgtttgggcgttgtaccgggcctaaaatattttctgcttgattttgcaattgaaaaccatttcagcttggttcacttccatgatcggagctttgaacctacttaagaaatgaaattgttttggccaatgttcttttccagcatgtcagttt

SEQ ID NO: 14506 - DNA, 629 bp, Gossypium hirsutum
agcttgctagccaattttttttttaaaaaaacttaacaacctaatgacttaaacaaaaacttctaaatagttcaataacttaaacgaaaactttagaatagtttaaggactgttttgtaattttttgaagttgagtgaccaaaacgtaaacttactaatagtttagtgacttggagtgtagtttaccctttaatttaatttaattaggttataacaagttaataatccaaacattttgtgaacttaaattgacccaaattaaattatcaaaaaccaaaacaatcaaaattttaaaaattatgaatccgaaatgatccaaattgaaattgtttgaaaattttagaacttgttccaaattactccgattaacaagtcccaaaattttttatttttctaggtgtttcatgtctaaaacataaagaaaatataattcttaagatattaaaagtaaataaaataaaggaaactacatcattattcactaaattatggataatttctcattttgttcacttaattgaaaatgttacaatttaataattgaactattcaaaagtttttatttaagtcagtaggttgttaagctttttttttaaagttctgtaagcgagctctaataatgattcgat

SEQ ID NO: 14507 - DNA, 579 bp, Gossypium hirsutum
  misc_feature (541)..(541): n is a, c, g, or t
gtgtttaaacagcaaaaaatatttcaaatctttaaataaaaaatgatacaccatttcattttctattgctacagacaaggagttgccacggatcagaacaaaagaatgcttgatgattctatgaacctcaaggtttgatgtcaagtaagaaaaaggaaaatccaaggctttccacatactcgtttccttttagtaatcggacttctattttagatgtcactaatgcctagcatcaatagaaaactgagcaaggcttcattcccatgaacttaatgtagagctaaaaggggagcacaattcttttgaactcaaaagaatgcataagaaaatctcaaacttgagcataatgctttggaacctcaaacttaataaagagctaaaaggattttgaaccaaaaacataaatgaagtacataagaaatcagaagactttgatcccgaaaagaaaaacgacaaaaggaatcaaggtatcgggtagaaaattggcatagcaaaatccaagagtccaggaaatagtaatagatttggcatgctcatgcancatagtccacaaaatgccacttcaatacatgtctaaac

SEQ ID NO: 14508 - DNA, 517 bp, Gossypium hirsutum
atcataatggttcgaccctaacctttcgcagctaaagcctaaggctctcaaggaagaaagatatataaagctttaaacgcatgtataatatatacatgtgtgtgtgtataatgggattcgagaatgaaacgattacctgtcttctttttacttgtggcttctttctcggcttttagtttttcatttgtgatcgcggtgattgaagatgcgatatctttggcatcggccgccttcaaagaagtagttgatagtctcattaccgccttgagtagtgcaatataatgataacttttctgcatcgaaagagagtatttgagcaatgtaagaactttctcaatatacaggcaagacacaaaaaagaaaaacgattaaaaactcacatcatatgggcgaagcttatgagaaataagctcagcatattcctcaaagtcgctttcagatttaggaataaagttatcaacagtcttgatatcacctttcttagcaaaaagttcggtagtcgaacctaaatcagctt

SEQ ID NO: 14509 - DNA, 687 bp, Gossypium hirsutum
acggtgcttcaagtgatagaacgtcggtataaatatttagacaagttactagcaaatctctcctcactaactaaggttcatattgtgcttagacttgcctgcattaggccttgtttttgaattcaacatctgttactttactttgcattatattttgcttaaaaatgactataaaccattaagatttcatgataacgctatctttttgctgctaaaattcggaattttaggatgaaatctgagtttagaagtgcatgaactgttagggttttccagttttgtaatctgtttgagttatgagcactatggtagttgaaatagatgaaacgaattaacggagtgatgaaaagaaagaatttgaaccttaaatgcttttgtatgtggatttgaaaggaagaaattgagggtccaagtgccataatccgtccaaggaggatgttaactgattgagcattgcatttctgcggtttcttttaaaatgtatatttttctctcatattcgtaattttatttcatgcagcaatgctttttattttgaaaattataggatggcatgaagatggggaagtcattagggaatacaatcgaaccaaatgaattggttaataaatttggagctgatgcagtccggtacttcttcctaagggaggtagaatttggaagtgatggagattattctgaagagcg

SEQ ID NO: 14510 - DNA, 624 bp, Gossypium hirsutum
gaaagaatgaacataaagaacaaattcaagaatatattttagaagaagcatgattgtattgaaattaagtgtagaattctcaaagaatttgagaataattccataatcagatttctcctcaaaagtaaaaaacaaaaacaggaataaaatctaaaacctaacaaaacctagaaaactaaagactaaaactaaagagaaaattatacagtagaaaaggtgtccataacttgtgttagctgatcctatttacagacatagaatggctatcgtccttaaccctaggtcagctgacattcccaaacttaaatttagattgtgtagaccaaaacgcctttgactcatattaatttctcatacagaggcaatgttgcgacacatcaggtcttgtgtaacaacatcgagggcagtatactcttctttaagggtatgtcgtgacatcctcatgctgtgtcgcgatattgaaggcagtcttgtacttcttcatttctactccctatgttgcgagatccaatgctccatgttgcaacctagtgaccaatatcgagtttagtatgccatctaatggtctcctacacactcacaaagtatatcagctcatccttagaccttattcacacgtaaaaa

SEQ ID NO: 14511 - DNA, 379 bp, Gossypium hirsutum
ctctctttaatcttgttctgcctccacagcaccttaactggcttcaacatcggtgtgaagcaggacaaatggaagcaacttgttagctgggtattgccttctcttggactccagcaacaataacaataaatgccaaagaaatggctgttatagtttgaatgctaactaaatgtccttttacgaagtccaaaaaagctaaagtgctaaaatctccaaacatacaactatctgatgctatattgagcaagaagttgtccatgcctgtcaaacaaaagattaaattgctgaggaggcagaaaaagccactttttcttgccgcacacatttgccgaccaactatatgatctgaaaacatcagcatgaagaggtgtccaggata

SEQ ID NO: 14512 - DNA, 395 bp, Gossypium hirsutum
cactacaaatcatcaatgacaataaagtaccaatgatccagttaccaatgatccagtaatatgtttgagtgcaacttggaaaatcatcaatgttttccaggttcaagaagctgctagatggcagatcaattctggcttttactattagttggataataataatttataacctctaatatatataaaatcacgagtttggaaatttttttaaacaaaattacattttattttttatcatattataattttgatatttaaaagtaattatagtatttaatgtaaaaaaataattaaaaaagtagatgtgaaataaaattggtaataattatacatttaaaaataaaaataatatttggtacaatgctagtagagtttttagactctccaaacagagt

SEQ ID NO: 14513 - DNA, 613 bp, Gossypium hirsutum
gaatgttccaaacactacgagctagattaagctttaggcagaattttttaaacacaaactacgaacgaaagattaattacaataaaaaagtaaaaagaatatcaaattgttgttaaaaaaaatttacggtggcttttcaatgccattcaaccttatagcaattattacaagatttgactttccttggaaacttctttttaatctataaataccttccctcaatactaaatcaaaacaaccttaaaaaatattaaataaaaaaatttacataaattcaaatttcatatattggaggtatgttattattcaataattcttttccatattattttttattttaaaatatttataaatagtcggaaagtaattttaagtaattataagaaaatatttttgttgatacaaattactaacaagtaaaagaggacgttagagaggaatgttgctgtgtaaggtttttttcagaggagccaatctttggttttcgtgcactcaagtttatataggaggggtcactttttatcttgtagtgccacgtagccaacaataaagtgtcatgcatgattgcacgtgtaagttaaataatagggctgttacaagttagttgtcgcca

SEQ ID NO: 14514 - DNA, 603 bp, Gossypium hirsutum
aagaacgcgtccatttcaaaacacgcggggcggaaaagctaaactcacacttaggtcacattttcggcggtcaaccttcctttccctctcctcctctgtttctctatatacactgccttttgtcctctgctctgaagcttttcttcttctaacatcaattcttcagcttctctactttcaactttttggttattttcagtgttaataaaaattttgttttttggtgcttgctgtaataaagcaaaaggaactacaacatgcatgggaaagatattcttcacaaaatgaaggtcggtttaaagttcaatcctttttttttatttttatgattctttgacgtattgtttttgaaaacaaaagggtttcatattgcttggtttatttcctagttttttaatatagttgttctttattgactaatgagttaaagattgtaattttatttacattttgggatttaatgcataaatttgcttataactttatttggctcctgaatcaaactatttgtgtgtatatatatatgttttgaattttacaatgtaatcatattgttgaattacttctgattttcttatagaaggcttaccaaggtagatgtta

SEQ ID NO: 14515 - DNA, 419 bp, Gossypium hirsutum
accccatagtgtgtcgttttcaaatcacatcaacagtatgctcgagtttcttatagtttatagaggagtccaaagtagttaaaattagcaggcttttaatactggtgtttcctttggccaaaaattatgctaattatatacacagcttatcttcagggaacatttattagacatgagaaaagcaccaatggtattcaatcattcaaacatttagatggtgcaaacttataatggcaagataataaattctataactagtagtagaaggatgagcagcctcattatacctctatctcagtagccttgaaatcctcttgaagaacagactgtagagcagaaatagcagtctgaagaatagaagtaataggaagcattagataaatgtgattattttagctattgttgaacgtgcaatatat

SEQ ID NO: 14516 - DNA, 631 bp, Gossypium hirsutum
aaaaaaatcccctctaaactaatcaaacaggtcatcaatccttggaagtggatacttgttcttaatggtcagcttgttcaactgtcgatagtctatgcacatcctcaatgtcccatcctttttcttaatgaatagaactggtgctctccacggagacacactcgggcggatgaaaccacggtctaacaacttctaaagttgagtcttaagctccgtcagctccttcggtgtcatctaatagggggcgatagacactggagttgtaccaggaagaagcttaatcccaaattccactttcagattcaaaggtaaacccagtagctccttaaaaaatacgttcaaaaaatcccttacagttttgatgtcctttacagtagagtccctagaactggaaacactaatataggccaagaacgcctcacatcccttacgaaaccagtttctcagccaccagtgcaaagatcacattagccaaataattttgacggtctcccattatgactactttattatcctcctcagttctcaagacaaccttcttagtcacatagtttagactgacacggtgtttgaccaaccagtccatacctagaatcaggtcaaactccccaaacagaagctctatcagatt

SEQ ID NO: 14517 - DNA, 400 bp, Gossypium hirsutum
  misc_feature (58)..(58): n is a, c, g, or t
tcagaatatactctaatatgtttataaaattaaaaattccaaattttcaaatatattntaatatctaaatttagcccttttttcccctcttccatatataagaatcaattaatttccttttgtaattacataccaattcaagtaaaataaaaaaatataataattaaatttttcaaaaaatataataattgatagattaaaaaaacattcaaatcataatttgtccaatttaaggtaaaataggaacccacaaaaaggaaatatgctcaaaaaaatcccaaaatttagattttggtcacaattaaaggaagaaatccctaaaacctaaaactcacaaagcaaaaatctatttaaaccctaaaaaagggggatttgatttttttttgaacctggcctttga

SEQ ID NO: 14518 - DNA, 579 bp, Gossypium hirsutum
  misc_feature (49)..(53): n is a, c, g, or t
  misc_feature (410)..(413): n is a, c, g, or t
  misc_feature (417)..(419): n is a, c, g, or t
  misc_feature (433)..(433): n is a, c, g, or t
  misc_feature (440)..(442): n is a, c, g, or t
  misc_feature (453)..(455): n is a, c, g, or t
  misc_feature (473)..(474): n is a, c, g, or t
  misc_feature (493)..(495): n is a, c, g, or t
  misc_feature (504)..(505): n is a, c, g, or t
  misc_feature (535)..(540): n is a, c, g, or t
  misc_feature (542)..(544): n is a, c, g, or t
  misc_feature (566)..(567): n is a, c, g, or t
  misc_feature (570)..(570): n is a, c, g, or t
  misc_feature (572)..(575): n is a, c, g, or t
ccaatcaattatttcaagccaaaacatgtatatttcattctcaaacacnnnnnatcacattcaacttactttgcatacttaatcgttcctacaattactttatcaaatcaacccctatacatgccatataaataaaaaagttgtttaacaaaatctaccggaataaatctggatagtgtgatccttgatgtagatccgatcttccgtatgtatataaatcaatctacaaaataaataatatacacaagtaaacttataaaaacttagtaagctcataggcataaaatataaatcttattgaacattgtacacaaacatatatcttttagtttaactaattcatcctgtaaatcacaatttcattattaagctcatttgaataatttccatgttactattcaaaatatttnnnntttnnnggcccttttctcanttacttnnnttgtctaatgnnngaacaataaactaattgnntacttcattatcatgttgnnntggaaaacnngggaattgcacataatcacataacacacgnnnnnncnnnaccgccgcggtgttcttacagnnatntnnnnatta

SEQ ID NO: 14519 - DNA, 561 bp, Gossypium hirsutum
ccttcctttcacactatcactttattggttactactctagttttcatagagttaatcagaattttcagcaacgcttcatttattcttccgatttcaggtactgggttgcacgttttgtttaacccaatcttgagcattgttcgggtctctcatcttctccaagtccccgttgcctaatctaatcatgaatttggcgtcaatgttggcgaatgcgccaagcactctcagatctgcatcataaaatttaactttgttaattccattggattcatgagcggcactatgattctaggggaaggaaggttgtctgctatttgccagtaattcatcccaatcaaattaaccataattggaaacaaataaattacaaataggaaaaaccaaaagaagaagaagaagaagaagaaatcagcaaaatccaagtaaataaaataaataaataaataaaaccaagaaagtgaacaacctagtaactgaaatcgaaagaataattgaagcatggctgaaaattctcattaactccatgaaaatacggcagaaggtgactgtgactgtaacgca

SEQ ID NO: 14520 - DNA, 662 bp, Gossypium hirsutum
agattgctgttcaaggaaggaccaaatcagaatttgaccaaccgtgtctatagttcatgctgattaaaacatgatcatttcattgtttggtacatgctaataaactaaaataaacaagaaatataggtagagcagttcccaaatgctccatgagctagatcataatcaataaaacaaaatccagttatttaaggaaaggaaacaaaccggatatttcttggcaaaaaatatgagattctctaatgatatgaatcctccaccccttcgaatagcaatgagataagatgaataagcatatattaagcaggaaagaaaacccaaccaagataactggtttttaaggcaaagacagtataccgaaaatctgttgaaggatctggaccttgccatcccatgtccttccaaagttctgatttaagagatggaagctccctgtgagggtaagccaatttccataattgcttaagagcttcctgccagtcaaatgaaagtatgataaaaaaatcttttacttgtgttcatatatttggtatatgggagggggttacaggagagagaaactagaaaggataattattggcattttcaactccaaaagagaagttgttggaattggcaaattcttttaatcaaatgtgcttccacagactataattcacaga

SEQ ID NO: 14521 - DNA, 559 bp, Gossypium hirsutum
  misc_feature (498)..(498): n is a, c, g, or t
  misc_feature (501)..(501): n is a, c, g, or t
atggagagaaagaaagtgattgcatacaaatgaaatagaatgtaacgcgggatgacaaagagagatatttgagtagattctataacattgaccataatgataagtaaagatttgtaaggtggagatgatgaaacatcgttaatttattattatttaaaaaaaaaaatcttttgatttttttcagtagaattagtgttgactctaagttaaagcttacaaataagtagatatgtataaaaatgaaacacccttatataagatatacaattgtgaatacgatgcatgctcctttgggtgtaagaaaattacatagaatataaacaagagagggatggggatggggattggggagttcatatccatcacgcattggatttggctgcttacgcgtcacccattggatggggatatatattttttataattttgttattgttccatgttgatcgtcaaaggtgataatgttacggagtgagagaatggaacagagcaagaaancanggagactatacagattgggacgagtgaaaggagaacgttggattgtcttctccacact

SEQ ID NO: 14522 - DNA, 377 bp, Gossypium hirsutum
gccgtttttacattcgaggtaagttcgaatgtaataaatttcattataaatgtaatttaaatgctttgatattgcataaattgtgatcacaagactatggacatgtttgacaatgatttgaagatgattcgacattcaaaatcctagttgaaccttaggaatagatttgggtacttgtgacatgtcattaggggattattgtgattatgtgattcgggtgctggtcctgttgagtataccgacatgtgttgcagttacttgacaacttctataaacagcaccgtgtagctacgtcttgacccatagcttgtgtgagcagacccgttgatagctcgagagtaagcataaatgtgatatgagattgagatagcttcgac

SEQ ID NO: 14523 - DNA, 619 bp, Gossypium hirsutum
tttcccttgatttgtttgctactttttgttgcatgcatttggtacggagataacatgcatatcatgaataggctttcatttctaccactcccatgcatttatgatatccctctatcattttggacatttccttattgttcctgcattgggtcttaagttccttttctaggaatcttttaaacttccatgaagtaatgatattattaaatattattggaaggaccccatatgatgataatgagttcattaggatatatgatctattggaataaatacaatctttaataaatatgaagtggatatcactcttacatcgtagtatgtgtcacataaagggcctgatacatcatcatgggatcagtgtttctatttccaaaatttgtgctaggaatgttgtggttggagtatgtaatgaagttacctttattctatctagacattgatggagcctattttgggaccacattcccaaacctgttcctgatgacacatgggcacttgaagccacaaaaggcaactcaaagctatgttccaagagtatttgggtacaagatccacaagccataatgctggaactaaaacatccttcatgacattttgccttctaatctggaagtaa

SEQ ID NO: 14524 - DNA, 648 bp, Gossypium hirsutum
ccaacaatgtgacgatcaacaaaatcaatgcagttaagaagacaagataaacaatcagaatcaacaaacagtgagcagaacaagtaaaaattaatcaaattttatcaatcttcgccactgattaaagttttatctcatagaacctaataataaatcaaactaataaaagaaatcaaaattgatactcatgcttaagtgaaccagagagtaattttcaacataatacaaagaaaaaaaaacattttaccgctaacttgtcagttttgaactttttaacagtagctcgaaagggaagagaagatcgtatacctgaagtctccgcttaaaccctaaatcaaacagcaccggcaaacctataaacaaattaggggctttttttaaggataagagaataataatgataataaggtagagtaaaatgaacgccgacgatgcaaggccgttgacgaaaatcttacctcgtagaagacgaagagcggcagagagagagaggaagaaagactgaaagaaacaaactagacagcactcaccgtaaagattaattcaacaacagcaatgcgatttaatccgccatttaatccgaattaggcttaaacaaggatatagatattgtctctgtccagacctagtccagcacgaaatatgacc

SEQ ID NO: 14525 - DNA, 483 bp, Gossypium hirsutum
  misc_feature (62)..(64): n is a, c, g, or t
  misc_feature (68)..(68): n is a, c, g, or t
  misc_feature (70)..(70): n is a, c, g, or t
cacaaaaaggtacctacttctatggtcttaaagttaaaagaaaaaacaaaaaccaattccannncttnantctatggcatgaaaataatcaaaagcaagttcaattttacatcaggcatccttggtctgcctaacaatatagtcagattcacatctagattattaaatgattattcagtttcataccaagaaatttaaagagtttaaaagtaaatctaagtttcatggtgtaaaaaaacttagtatatcacagttagcaatcgaaagaaatacaaaattggaatttggaatgatacccttcaaggtcaatactcaaagcttctcagctgacataaaaaacaaaaagcataaatactagggtccaaaattgaactgagcttaaaaactaatcaacatccaataaattgaaaccaaaacacccaaagtagcaaaaacagctgcaggattcttttaaatattagcactaaaaacaatttgcaccaa

SEQ ID NO: 14526 - DNA, 655 bp, Gossypium hirsutum
tgctttgcttaatatctacctgaggaactatttatttattgtcaagacaaattccaaaagaaaagaaatccataataggtttctttacaagttttatatatatttctattattattgttattttacttggatggttcttgacttgtcatcatgcatgtcaataagataaaggaaagcgaaggagtttaaaataaacatacagaacccttttacccaccttcctaaaagttcattggtaagttataagatccctcctttctaactgggaaaatcccataatggttcttggcttattttagcaagaggaagaagaacaaatatggatattctcttaaagaacatattctctgaaaatttgaaaaacttaccgatcaatctgttattgcatgcaagtgtttcgttgtcttaagttttccaaccttgcttgcatttttagttctaaggcttaaagaggttcaattttgtttttggttcaagtattgaagtggttcttggagcctttctaagatcaagataaaagcacaattatattgttggagttttgtaattatgcatgttcaataataagttacggccattgaggtacatattgaagaatacagacataacctaatgttactcggacttgggtgtgagtgttggatttgggtgtgtt

SEQ ID NO: 14527 - DNA, 725 bp, Gossypium hirsutum
  misc_feature (570)..(573): n is a, c, g, or t
  misc_feature (575)..(577): n is a, c, g, or t
  misc_feature (580)..(588): n is a, c, g, or t
  misc_feature (591)..(591): n is a, c, g, or t
  misc_feature (603)..(605): n is a, c, g, or t
  misc_feature (616)..(621): n is a, c, g, or t
  misc_feature (625)..(628): n is a, c, g, or t
  misc_feature (631)..(631): n is a, c, g, or t
  misc_feature (679)..(680): n is a, c, g, or t
  misc_feature (695)..(697): n is a, c, g, or t
gggttatcaacagcacaccttctttaattgtcgtccatgcatgtggctgcaccattttaatccagcaaattaaattagtttcaaacacaattaaatttagcagcaactaaactaattaatttggaacatgtaattaatttgtctagtctaagctaagacacattaaaatcaaaaaatgactaagacacaaattaatttcaacagcagccaaaacacattaaaaatcggtattaagctaagacatattaataacatgcattaaactaagacacattaaacactacaattattaaattcagattataatttatttatgagctgaaacaaattaactacttagctagacgcataaaattattccagcatgaaattgttctaacaaaataagacagatgcaagctaaaatgaactaaaatgaaattaattaaaaaggataaaattgagctcaatgagctagaatcgagttgaattaagctccattgagctggaatcgaattaagtcagcttgcaagagtttccaagcaacgctttgggagctagtccaagagtgtgcctcacaaaactcttggnnnngnnnccnnnnnnnnnttngaaactcttgcnnntgatttaattnnnnnnccgnnnntgnagtttaaattcactcgattctagctcattgagctcaattttatccttnnaaattaatttcattnnngatcattttaacttgcatctgtcttatt

SEQ ID NO: 14528 - DNA, 380 bp, Gossypium hirsutum
gggggggaaaattttgatataattttgattcattttcaattaaatttataggaaagttcttcacctaattaacttggcaaatatatttattattatgataaatttaaccttaatatatatatattaatatttttgttttaattcgttttttactttcatcctcaattctttttatatatagtatcagagttaggagatgagagtaacacagtttgaacccgtgtcaaaccgatgtttaacaagagttttaaccattatttcattcaagtcaagacttgatcttcaacttttaaagttcaatcaaattgtcttttacgaaaaaacttattaaactgttaaaatttgaacaatattgacgtgacaatctgcatggtattcct

SEQ ID NO: 14529 - DNA, 666 bp, Gossypium hirsutum
atgattgcactgttgtagtcggattcaatgattaagctaaaattgtgcacccaactgacgaaacatctttagcaaataaatgtatatataaatatataaatatttataaaaaaataatttatatttaaaatattagatacgaaaataaataagataatgaaaattagaaatcgaataaaagaatcaatttttactaaatgttaaggtctgttttacacagttttcttaaggtacagatttggctgctcctatggtacttgaagaaatgttggtcaactatctcccaagatataacaacaagatgatcgaagcagtagtacctctgtagtgatcaacgaacaaatattatcttcttctatcaccgaaacgttggaaaatatgaagagaaaaaacgagaagaattttcccgagcaaaataaactcgtgtgagagagttaaaaaattttgaggacttaaggcttttatagacatttaatatggaagaattttagaaattttcatgaataaaaatacaaaatctgcattaaaagagctattaaatcaaattgattggaatcaaataaaatcaaaataaatatgatcttaaaactagattctatattattgttgagaaaaaataactttcgtgttaggttaaaatattcgcagtctactatgatcaagacc

SEQ ID NO: 14530 - DNA, 532 bp, Gossypium hirsutum
aaaaaaaaggtttttttgagttcttccaatgtaagcgagagattttggaatggatgttcgaggagagtttgttgtcttaaagtgtaaaactatcccttttctcatgagtgtacttttgactttgttaatgaagtgattttatgataaaaaattaatcttttttcttattagtattaatttaactcgtgacactaactaattagaaactttataagtgtatataatatacatagataataaaagaggacatgtatttgaatgtactaaagtgcattattcttctatttatagtttaagaaagaactatggttagttctaggcatttcctaaaaaaacagatattatcagaacttataatgagattatttaaaaaaataacacacaagttactatgtaccgaaagaaatttacaaattttaaaatgaaaggaaaatgattagattatgaattaataaaacagtgattattctgtacacatattagaaaaatgaaggacctagtttaaattaatccctcgtaattgaggtctctt

SEQ ID NO: 14531 - DNA, 381 bp, Gossypium hirsutum
aaaaatttatggttgcattggctgataattgacaaatgctgatgttgatatccatggcagtatcaaagatgaacaaacttcttttgttatcatcatttaaatgctgatttttttgttctttgtaggccatggaatttacttaattcatgtttttgggttaattgtagcaaacattttcgatttaagatataaatttgttgctaaactttcaaacgttttaatcgaattctcaaagtattaatattgtattggtcaagtcttttattcattgtcttgaacattaaatatcagttcaaatttgacgtggagcatatttgaaacatacgagatcaaattgcaatttgtctatacctatcgtgtggacaatgtaaatctaatggg

SEQ ID NO: 14532 - DNA, 701 bp, Gossypium hirsutum
  misc_feature (673)..(673): n is a, c, g, or t
tgtttagttgatccccattcactcattaatacaaatgttagttactaatataccaagaaccattttaaattattactatttcaaggaaatttcaaagaaaacatcatagatggtatattcttttgcctgctgagttcacaataagcatgaaaatgatatctttgaactcttcttcttgtcctatgtctcatttttctttaaagcaaaaattgacatcttctaacgtttctgtttgtatttaccattcatgaaagcttgaaaagcaaacaaaatttccgtatttttcaaatcttcttcttcgtactcttctccttcgttttcctctcttttcaaccgtcaacaagtactggaatttgccctgtttcttgtggtgatcaacggattcgcttcccttttcgtcttagcaaccaacttgatcttcatccccgttttgatctcttatgcaaaaatcaaactaaagcagttctcacccttccattttctggtcaattcatagtcgaaaatatcgattatttgtatcaatgaccctaattattgcctcccaagacatctccttaagggtatgaacccctctggtactccttttgagcctcaatatgctgaaaactatgtgtttcaaaattgctcaaatggtgcaatatcaaaacaaatttccccaattaaggaactttcntggcctaatggccaaacttttcccgggg

SEQ ID NO: 14533 - DNA, 603 bp, Gossypium hirsutum
tgcttggagttgaagtgatacaaaagtaggtaaggatttgattctgggttgttttggaagttaaacaaagattcgatttttattacttttgagggagttcataagctctttctatgattatgttgattcttttgtgattatagcttttttggattcttgtggtggggtgtaatgagcaggaaaaatggtttgatcacagtgtacatggtctgggattggttttaaaatggagaaaacattagctcttttccattatctgattgctcatatgtatgcttattgccttggtttttttattattttagaggaggaagaggtgtagttagctaagattaatggatcaagagaaaaggggtgattgcatagggactagtatgaacttgagtcaagttggggaatgtgtcggtggaaattcaaagaattcgattaatggggttgtgtctggaaccgccattgtggaaaattctgaagaaaaattgtgttctaatggagaaaattcggatttgagattgcaaaatgatggctttgaatcgtgtaagaatcaggagatggattttgggagaggaattggtcagaatgatctgggaactaacggaaataaaa

SEQ ID NO: 14534 - DNA, 557 bp, Gossypium hirsutum
  misc_feature (205)..(205): n is a, c, g, or t
ggttaagtgacaacaaggttctggaagctatggcagtcagaacctacattattccaacatttcatttttcttgaaatatcggtcttgacacgtatttagacatcatacggggacctctaagttagggaaagaaaaacatatatgtgttgaacacatactgtttgacacttccacccaaatccaaataacataagttagaactaanaattagggttttttttcttcttgttacacagtatgagtagttgttactattggctagttggcgtcaaataataatagaagggtagttgtgggggctaaccgttgggtgatagtggcttggggttaaatgtagagcgaatatgcactatcattttacctcatctgtctaagattttggaatcatatctccgctttccttccaaagtaacacggatggattcccattttttaccttgatagaattgttctcatttggtggctgctgctttgaatttacctaaagaagtgactgaaattgtcaaaagaagatgcctagatagccttcctgttcctttgtggttagattccaaaat

SEQ ID NO: 14535 - DNA, 307 bp, Gossypium hirsutum
  misc_feature (53)..(54): n is a, c, g, or t
agagaggaggaattgtcgagcgggcggcacaattggatgttgttgtgaccccnnttggctaggttgcgcagcctggaggatgagtgaacatctctccctgatggttgattttgctttttggtgtaatatttttcctgcagttcggatcaaatgaatttaagttttattttgaatctatttttggttgttgctattgaatctaaactcgttatccgattcaaaatatgcttgttttgttttgttctttaatgttttttaaggttttcataattatttgacctgatcatgttttaacattaaaaaaaaa

SEQ ID NO: 14536 - DNA, 686 bp, Gossypium hirsutum
tcggaagagtattcataaggccattacagtgatttctaaaggggttcgatgaagagttggtgatggaaagctaataagttttcaatgacctttggatttgcgatgatgaaatttttttttattaattccattcccagtgagggatgtgagcatttaaaggtaaatgatttaattcacacaaatggtatgacttgggattcagatatggttgaggggcttctaacaccatatgatgcaggtcgtgtctttgcatgccgattagctggtcgttgggtgttgatcgacttgtttgtagttccctcctaatggtaagtatacagtaaaatatgcttataaagtggcgttggatatatttactagttatgagagttttcatgttgatggtccttggaaagttctatggaacgaagtgttgttggctacaattaaagtatatctctagcattgtttgcgaggtttcatccagtgtaatagccagcttgttaatcgtggaatccatgttgatcctctttgctttcgatgtcgccaagttgaaggaagatattaatcacgcccttttacagtgttcatatgccagagttgtttgggatttgttggggatgggtttgtatttgaggtcgtttcaaattttattgtcacggtccttgctggtcatcggattgagcgtcaagggaagcttctatgta

SEQ ID NO: 14537 - DNA, 408 bp, Gossypium hirsutum
tgaatatcttcatcgcagggaattgtgaggccgccggtaggatgactatatccgaactcttcttctgacttgcctagcaaatcttgaaataaaggctggctcaagaatgacactggtatcacaaacctcttctggttttctccaacataaactgcaaagtagcccttgggaactttcttagagcttatgatacgaggcgagcggatagccatttttgtttacaatagatgtatgctttgaaaaaggaagaagtggaggatctcagataacttagaaagcaagcttgagaatgttgaaggtaggtgttggcaatgaacttaatcttacttttatatatagatgtaaggggcagagaggaaataatgttcatattttattaagggggggatatggaatgagtggtgaagg

SEQ ID NO: 14538 - DNA, 688 bp, Gossypium hirsutum
tccattacccaatctttggaaattctgatttatcaatggaccaccattcttttttggtgggtcttgttgtcaaaatcaactattatgtagaataatcgttacatgttactcattatccgataatgagtgtcggatacaaatgtaatgtgcggtaccgtgttgaaggcaatgaagggtttgtctttttagctttttgttgcactatttgatctaattatgtatcaaaatcaacgatatttccggcccataacaatctcctattaggaattttgactaggttgtgttctaattaatgaattcataatgcagatatgtcaagaatgcacatggaaggatttgacaggcatgtcttattacttgtttccaaggtcaaaattttgccagactttgaattttaaagagtttggttaaatgcctggtgaacagttcttgtgtaaaagatgaattagctttcttcttttatgactttgcttatgatgaaatgcacatttttggtattggctagggaggaagaaaactaaggataaagtgtagaccatctaaaaaatagtgaatgcacaagctgtttttgaggatatgcttgatttaggactttgttatgtttggatgtgtcaatgtgaaaaataatttactaatgctatgtcacctttattttcagatatttagtttgatgtgtttgagatggagc

SEQ ID NO: 14539 - DNA, 662 bp, Gossypium hirsutum
  misc_feature (513)..(518): n is a, c, g, or t
  misc_feature (520)..(520): n is a, c, g, or t
  misc_feature (525)..(541): n is a, c, g, or t
  misc_feature (543)..(552): n is a, c, g, or t
  misc_feature (554)..(554): n is a, c, g, or t
  misc_feature (556)..(559): n is a, c, g, or t
  misc_feature (561)..(568): n is a, c, g, or t
  misc_feature (579)..(581): n is a, c, g, or t
  misc_feature (583)..(587): n is a, c, g, or t
  misc_feature (591)..(596): n is a, c, g, or t
  misc_feature (598)..(622): n is a, c, g, or t
  misc_feature (631)..(636): n is a, c, g, or t
  misc_feature (648)..(648): n is a, c, g, or t
  misc_feature (655)..(659): n is a, c, g, or t
aatatcttccatcaatatcatgattttacaatttatgtttataggaaaataaggataattccttttatcaacgtatgaagatcttttatgagtagagctattaattttgctcgtactacatttctcataataattcatgtgtatatcatataaataattaattattttttaataatattaattataaaattaaatcaaactcaatttaatttaaactaaaagcattaattttaaaacttcagaaacaatgtgaaggaaaagagactcaatggtcaattttactagcccgtatttcaaaaattggaataacggaaactaaaattgtaatttaaaaggtaaaaaccctttaaaataatgccaaaaacatggaggcccgtatgatgtaaattcctcattttttaaaactcactttcttttctctcttccaccctttttctggcaagcattgcccgtcacagaacccaaaattctctagtttccaaaggtggtgcactgtggtctgtacataaaaannnnnncntttcnnnnnnnnnnnnnnnnntnnnnnnnnnntntnnnnannnnnnnnaaaaataatannncnnnnntaannnnnnannnnnnnnnnnnnnnnnnnnnnnnnagtaactcnnnnnnaccctattaatnatattannnnntct

SEQ ID NO: 14540 - DNA, 413 bp, Gossypium hirsutum
tcacagttaaggtgttggtgtcgtggtgttgttggttatcacgtcaatctaacacactgaaggtctccgattcgagtccgggcgacgccattttgatattaattttcttttggtaattttgcgatgcaaaacccaaacgacgtcgttaaactactccttgccctttacgtcagtcacccgcttatcacggaaagaagtgccaagtgccaacaaaaccgaccaatagtatttgtgtttcgcataaattactgtctcctgattggctattcaatgccacatcaccttttctagagtctccaccactcatctacaaatctcccatatttaggttccctttccaagttaaaatatatccaaagaaaacgaaccactcgaataaaaatctttggagctcgcctctgtattcgatctct

SEQ ID NO: 14541 - DNA, 603 bp, Gossypium hirsutum
  misc_feature (370)..(374): n is a, c, g, or t
  misc_feature (376)..(381): n is a, c, g, or t
  misc_feature (383)..(383): n is a, c, g, or t
  misc_feature (447)..(453): n is a, c, g, or t
  misc_feature (516)..(518): n is a, c, g, or t
  misc_feature (527)..(529): n is a, c, g, or t
  misc_feature (570)..(572): n is a, c, g, or t
agcataaagaatgtgttgggaattctgaaacaacaacaccagcttgtgccacattagctactttcctccctatgtcttaacgctcgccaaatagaagcagctttgtatttcagaccactcctattgcatgggagtaaattccctgcccttgtctagtagtactcattttgtaacattttagtagcaccaaatggaccttcatttcacaattaaatattaaaaaatccaataatttgaagagcaaccaagttgttgaaagagataatagttgtgtaatttagatggggagcatatataaagggcactcatattttaatactatgagacgtagtgtagtaattgctcaccttgtctcttaactttaaggagnnnnngnnnnnncnaggaagggtggctgacagagtcgaaaatgggaatgctgtacgggagaagcttctgcggagctannnnnnnattgctcgccgttcggttgacggatcatctttctatggaggcagtgtgatcgatcctaatggnnntggcccaannncaagggataatcatatgttgcacaccaataggagtgtcagnnnttctcctaacaacccttgacaatggtctatt

SEQ ID NO: 14542 - DNA, 379 bp, Gossypium hirsutum
tctaaaatttaaatttaagtgtctattaagcatgtaatgtatcttaccaattaaattttcatgtgagctgtcatattatctagttagaaattttaactagctatatttaagaatttaaataaaattttaattgaatgcaatttttattaaagaattaattgattttctagatttattttactgagacgtttttacatttgattgctcacaagctatcattcaccttactttatatatatatatatatatacacacaccatatttaaatagattaggataagcataaataattacttactttatgcttctatcttcctttctatttcacgcccaatttcttgggaggtttgttgatatgacatcttgattacccaaatcg

SEQ ID NO: 14543 - DNA, 580 bp, Gossypium hirsutum
tttcaattccgttgttcattgcacatatttttgatagaatattaatgggtttttttgctaatattaatggtgaagggctagttttttgccgagattgtgaaatcaaataaagccgaactccaaacatgaggttccggttaggtggagttgttaaaagttgaacaaatagtattttggggtaaaaagataataaggtttgaggagggtagtatggaacctctatgcgatttttgtcgaggggtaagagcagtagtttactgtaaatcggattcagctcggctttgtttgagatgcgatgggtgtgttcactctgcaaatctgttgtcaggtagacatgctcgttcacttttgtgtgagaaatgtaattctcagtcttccatagtccgatgcttggatgagagattgtctctttgtcaagattgtgattggaatggcaatggttgtttgagtttgggacataggcgcgagcccttgaattgttataccggttgtccttcgatggccgagtttagacgaatctggtcttcagttcttgatgcttcttctcgtggcggttttgatactgggtttgtcacagcaa

SEQ ID NO: 14544 - DNA, 539 bp, Gossypium hirsutum
  misc_feature (58)..(59): n is a, c, g, or t
  misc_feature (66)..(66): n is a, c, g, or t
  misc_feature (527)..(529): n is a, c, g, or t
tagaaattgaatcagagactgaatgagatatcaaattagagcttaatgagtctatttnnttataanagaaacagagcaagcaaaggaattctatattatgagatatttaagtttttgagagactggttcagaatgactacgtgatcccctgttctgacttggaaaaatcattaaaaattgtaaaaaaataattaggggatataatttatatgcttgaaatccttaatgagtctagtttcaaatgaaataaacgaaaacatcctttgaattctgtacaaggaaaaaattgattcgtagtgaagagtggtcagaacagttgagcagtgaaacaggggtaacttcaatgaataaactgtactaattggctagaccaaaaattttaaaaattttatggtaagaatatatgtgaatctagtttcaaggaaaattaacggtttgtaatttggagttctgtagctccagaaataaataatttagttgctggtactctgctagacagcttattttgaacctgtttataattgtannngggaaagtat

SEQ ID NO: 14545 - DNA, 724 bp, Gossypium hirsutum
  misc_feature (62)..(63): n is a, c, g, or t
  misc_feature (387)..(388): n is a, c, g, or t
  misc_feature (397)..(400): n is a, c, g, or t
  misc_feature (419)..(419): n is a, c, g, or t
  misc_feature (421)..(421): n is a, c, g, or t
  misc_feature (439)..(441): n is a, c, g, or t
  misc_feature (445)..(449): n is a, c, g, or t
  misc_feature (457)..(457): n is a, c, g, or t
  misc_feature (459)..(475): n is a, c, g, or t
  misc_feature (481)..(482): n is a, c, g, or t
  misc_feature (524)..(528): n is a, c, g, or t
  misc_feature (535)..(539): n is a, c, g, or t
  misc_feature (554)..(567): n is a, c, g, or t
  misc_feature (592)..(594): n is a, c, g, or t
  misc_feature (601)..(608): n is a, c, g, or t
  misc_feature (645)..(647): n is a, c, g, or t
  misc_feature (654)..(663): n is a, c, g, or t
  misc_feature (672)..(672): n is a, c, g, or t
  misc_feature (687)..(689): n is a, c, g, or t
  misc_feature (702)..(709): n is a, c, g, or t
  misc_feature (712)..(718): n is a, c, g, or t
atatatgcttcagcgcactcaaacctacgtcctcctgcattgagaataatattcatgcccannaagttaatactcaatcgacaaaaagatatatcatctaaaatgaatgtaatttttttaaaaaaattatcatcacattcactcaccatacaaatatatatatatatatcttatcaaactctaaaataaatatataaaaattgtgagtgttaaatatctcttgttttataggtcgtatcgaaatttacacggttgggcacaaatttcccaaacttgtggactggggcaaaagaaaaattaaagacaatgtgaggcagaaatacaagaagatgccaaaggagcgagtaagtatcctgtaaacgagatctacgcgagtggtacctaggnnagaggttcnnnngttataccattgtagggancnatcaccttactacaaggnnngggnnnnnaatattangnnnnnnnnnnnnnnnnnttcctnnctaacctctactccttttttgtatcaatcggaccggtcttcnnnnnaagatcnnnnntttccattgcctacnnnnnnnnnnnnnnctcttccttcttcctatgttcaagnnnttgtacnnnnnnnncgtcttgtacttgggctttccttttgagtgcaggaannnatttttnnnnnnnnnnttttttttnttttttttttttccnnnttccccccttttnnnnnnnnctnnnnnnnttttct

SEQ ID NO: 14546 - DNA, 589 bp, Gossypium hirsutum
aagacgccgcctgctattaccgcgcaggtatacttttattgttgtttgaaagttttggtttttttcccctgtcccttttaatgattttcttgtttttcaggagtcgtcatcgaccactaactcgggttcagtaaatgccgattggtctgggtttcaggtttgttagataagatctttagtttcattgctttattgagtttcatatgtaattcaaataattacatgtggattgttgtttgctaacaggcatattctcccattcctccacatgggttcttggcgtcaagtccccaagctcccccatatatgtggggagttcaggtacttatgatttctcttagaatgattcattgttatgatagttaaactttctctctttcatttgttaaagagctttaagatcttgtggcatgattagctctattaagatttaatgacttaatgtactggttcataaagctttaatgtaattctttctttgttgcagcatattatgcctccctatggtaccccaccacatccttatgttgcaatgtatcctcacggtggaatatatgctcatccatcccttcctccagtatgttctctt

SEQ ID NO: 14547 - DNA, 663 bp, Gossypium hirsutum
actctgcgtttcgggtgatacttgcaaaacagcgaatgcctttgttcttttttcttctttcagtggatcacagaaatttggcgtcccttttcgttttatctaaatgcttattttctgtgttaggataaacttgcacgaattcgatctaagtaattaatttggtgattttattagtttaattaattcatttaattcaattcaattaaataaattattaaaaagttgtactaattaatgtttgaataaaaattctttttaaaagcgtcctttttttaggacttataaaaatctttcgagtggtaccataatttgttctatgtacaacaatgtgttgaactatttcaacaagtttgcgcataaaatattcagcatctgggtggtatccacaaccccttttcgggcttcataacaagaaatgatatattctgttaaagacaatctttcgcgtaaattgctttgaatgggtagattgataatatgttcttggggatctgacattaatcctttcatacctactaatttgtgcacttgagatgcatttcctctagctcctaagatagacattatatggactgggttaaacaagtcagtcatcctaaaattaggattcatttcttgtcgcaaatattcatttgtagcataccatatctcacttgattggcg

SEQ ID NO: 14548 - DNA, 694 bp, Gossypium hirsutum
ctcttgatagtgaggatgccatacctggaaacggtgactgggcagtaaagctgggaatcaacttattttatagttccaatctcagccattctatgttgtacagtaaacagatgccatataattccgttatatacagtgcatttggccgtaattctcctactagctcactgacaaagttgaattcttatgggcggaggtctcggaagcagaaaaaagtagtggcgggaaaatggtgtggtaaagtttggatgtcaaatcaggttcatccatttttgacacaaagggatcccggggagcaagaacaagaaaaaagctaccatgcttgggcaacttcggatgaaaatcttgagagtaaaccagaaaatattcggaaagcagaaacatccaaggtggctaaaaggtttactagaaagagcaaaacaagggcggggactacaccaagcaagaaagcgaaatgcatcgagccagagagtgtagtttcggatgattcattggatggtaattctcttaggcagcaacagagattttttaggggcaaaaaacctaaactaatcgagaaagagaaggaaatttcgtatgattcattagatgatgattctcttctgcatcatagagatctctctcgaagaaaaggggccaaatttatcgaaagggaagcttctgaatccgaggatgtggaggaggattctgatga

SEQ ID NO: 14549 - DNA, 398 bp, Gossypium hirsutum
tattcgaattatcgtttcacatataaaaaaaaataaactcttgaaacacaaataagagattttaactactattcttttaacttgaaatcataattttcagcggttgtaaatataaaataaataaaataatcttttggaagaaggtttaaatttaagctaaaaaatttaagctaaaaacttgggaatgaagctacgtttattacaagttcaaatagttataaaagaataaaaaagaaaagtcttttagaatgatgtttagtttagaagctaaagacttgggaatgaagctacgttttttacaagttccaaatggtatgtaatgtaatgcatgacctgaagtaaacgaatcgcgtcagcgctggcgtttatgttttccaatttccaccactaaactttga

SEQ ID NO: 14550 - DNA, 508 bp, Gossypium hirsutum
cattgtgaagcactcaattagtgctcgtctaataaccttgtcataagtttgttaccctaataggatatccttaatctctttgggttaatacccgttctcccaatatgatcatattttatatcttggtaatcattacattttccttcatgaaaagtcaactatcaaatggtgaacaagtcatccatcacaaagacgaacgacccgtggccacgtttacttttcatcaaccatataattccaataaaaagatattatttacccacgtttcaggctatgaattccactattgtgaatgtcgctacatactgcaaaagttgtacacccaacacattagcattcagttccttatctattcaaacttagacttttacttacatcaaagtgtacgagtcacgtatatatagtccgtcatccactcaggatttaggtatgtcacactatgaacgtagaaagtgaataaatctataaatagatttagggtctatttctcttgagtcctgttcgatgt

SEQ ID NO: 14551 - DNA, 654 bp, Gossypium hirsutum
tctcatgtgggatattttactttcagatgtaccaaatgttttccgcaccagattccaggtacaatgctcaatgtcagtcataaaagaaacacattattttgaattgccttagcaagtcggtgatgctttgtaattcattacatgcaagtatgtgtttcttacgtattgatttgattgcaatgccactttgaaaattttggttgtgttgcttggttcattccgagtacatgatacgacatgaccacctaaaacatgataaagataagagtatttgaatgtttaaaattttatataacacgatttattaacatatcaaaatttgtataaatataaattactttgaacatgattatgagatgaaaagatattcaactacatgacttgccatgtctacggctcgactttggcgaatttagctgttataaatgacaacaatgggaagggtgatgagacagaatctgaaactcgaaattttctccaccctttaaatgataacatactagtataccatttatatctttcaacatgattgcttcgaatacatgtatacttgaagagaaaagccatattactcggatgagagagttaggtacagatatttttaattttcttttaagtatttctatgtacatggaaggtctttggagagtcatc

SEQ ID NO: 14552 - DNA, 646 bp, Gossypium hirsutum
taagataagctaagtaattcctcgtgctcgactccggaaacggtctcgggtaaggggtgttacatgaatgtcaacaaagtttcaaccgattgaaagacctattaacgaaagcacctgtattagtgtagccttaaccgggtaaggaatttgttatttacagtgatgcctcattaaatggtttaggttgtgttttgatacaggaaggtaaagtaatagcctatgcttcaagacaacttaaaccacatgaaagaaattacccagttcatgatcttgaattagctgctattgtatttgcgctgaagatatggcggcattacttgtacggtgagaaatgtcatatttatactgatcataaaagcttgacatatttgatgacacagaaagatttgaatttgagacagcgcaggtggcttgaactgataaaggactatgatttgattattgattaccatccgggtaaggctaatgttgtagttgatgctttgagccggaaatctctgtttgctttacgagttatgaatacccggttatcattgactgatgatggttcaatgctagctgaattgagagctaaaccaatatttttacagcaaatatgtgaagctcagaagaatgatgagaagttacaagttaaacgggcacagtg

SEQ ID NO: 14553 - DNA, 467 bp, Gossypium hirsutum
ggaatcacgagcaatgagatatcaccatttatgccttatttaggggcttttcatattttatttatttttcattagattataattggagaagagattgaaacaaataaagttaattttcaagagtcttaatttgatttacttaatttaaaagagagactgattttgaataaattagatcaagcaaggacttctttttagccccttaatgtgttcatgtttctttacataaatgattcatttttctttgaagttttcgattttgaatgaaatgatatcatgatattgggagacttcttattccgttcacgttggaacttgcttttgcattgtataactagacttttatattagtattgtatactcaaataatgttttgtacgggttcatttacagtgaattactctttatacacgtatttgtagacagacaactttggtgtcgagtaacccaatggtttccactttcca

SEQ ID NO: 14554 - DNA, 498 bp, Gossypium hirsutum
gctgctagcattggtttcaatggaacaaatttggtcatcttgtttaaattactatcttacaagacggaccaagcttgatccattaacaacattaattcttgtactttttttaaatttaatttatagtttgtaccctttagaagctcttcctccacattgtgtttttatcaataattaatttcaatacttaattagtttgtttgcctaacacacattcctttaatatctataagacttaaaattcatttaaaatactttaaaaataataatttaaaaacaacgttttattttataagaaagaaagtaaatattgaaaagggaaatattttgctgattttatcttaatttaatcaatattattacgaatataacaagaatataaatttgaatgtacgtaaatatataatataaaagggaggataagtaatttaaacattggatataaaaaaaaggtaaattttccaatgtttctttcgtaggccacttattaggtaaaca

SEQ ID NO: 14555 - DNA, 505 bp, Gossypium hirsutum
tccaagatggtaaggaccgattgagatgatagtgggagcataggcgtcgggttgcacctaacgcatgttaacggggaccctgtatctatatgcacgcattttctctgtcattgggaacattaattggctttccactttgataaatgttgttgattccaagctttggcagtgtcatgaaaggttctgcttgtcttgtgcaaaagcaaccttgtaagggagcagtttctcatttccagatgtgaagatgttacaagaaaaagagtaactgagtcacttaggagaaaattgataagttataaggaagaatagttcaactcttaaacagtaaggttaagttgtctattaattgaatctatcctcaacaagtgtactttttataaatatatttttgttaaaaacaattacttatcgcaagtaactatatattagtaatttgtaactccgtgaataacaaataattatatggagggagaatctgggaccgttcccagcacaagatgtaaaa

SEQ ID NO: 14556 - DNA, 659 bp, Gossypium hirsutum
  misc_feature (653)..(655): n is a, c, g, or t
aggggtttattctattgtattgaaattctttaaaacttatattgatatattggtctctctatattaataaaagcagattaataatctagaagaaaccaagagagcaggcgaactatatggctatcctcttatgattaagagcaagaggttagcttatgatgggcgaggaaatgctgttgcaaagagtgaaggagagctttcttcggccatagatggtaagggagatgctattagaaaggagatttttgtagcatttcatcattttcttaattcataatgacttaccttaattttttaaggcataatatttctctaaatatttgtcaaagactaaaatgttggttttggttatcattccaaatcaacaatttgtatctacaatttgtataagtcttgactatatcaatacttacagaagaacatgtctaatttgatgtagatgttcatatggtgattgtcacttgggactggagaagttgtcttgtattctttccttttctttattagtatctaattttgcctatgactagttccttgttcttcttgactttgaaatttctcataaactccatttttgtaacttagatactgaacatttacttttccagtttaaagaattttcatttttattgcagttcttggtggatttggannncccc

SEQ ID NO: 14557 - DNA, 613 bp, Gossypium hirsutum
tcatgtaaacctgaacataatatcttcttttggttatttaatgtattaaaataaggaaaagattattattacataaatattaaaataaatttacattttttaatttaaaattagaaagataagtaaaactttagttaaaaaaggtttattcaaattaaataaaactttttttttcgttacactaaaaacaagttatgcgagtaattaaaaagtatcaagcaaaattttattattaatttatgtaatattgttgttgcaataattaagagaacgtgggttgaacacatactacatcttgatttaagggaattatgagtggtaataaaaattatataaaagaaagaaactgaccaaatagtaaactagggataaatattttcaaatgcaaagcagaaatggaattcatatataaaacatattgtacagtatctattttactattttaatgtttatttaacatatcacattcttgtgttcttgtatgggtgtcaaaaaaatatacgtattatccataaataatttaaattacaccccaaccaccagcaaagaacatgactgcactcactgcaatatatgttgtgttagggccagcctgaaattgggaccaaggatt

SEQ ID NO: 14558 - DNA, 523 bp, Gossypium hirsutum
tatacaaggagcagggactaagccaaaaatatttacgaaaaggggccacactgtttatttaaaatagatattttaaaagtagggttgactcatatggatcgagcttactttgaacaaggtattttaaaatttgagctagttttgatcatccaaattgacatttcaaaaagtaaaataggttaaaagttcaatttgcattagatatcacaattatttaagtttgtttttttatgaaattaatatttaaataccacttatcatttatatgttgcaattagttaacattattattttcttaccaaattaatatttagatattactttgtattagtttaccaaattaaactaaaaatgttaccaaatattttttatcaaattaaattttagatactactttgtattactttatcaaactaaactaaaagtgctactaaatttaatataaacatctataaactatataaaagaaaccaagttaaaaaattttagaaaactttttgggggccaaacacaattgtcatat

SEQ ID NO: 14559 - DNA, 527 bp, Gossypium hirsutum
taaactatttgataatacagccagaaagcaataccaatcttttggccaactctgcttctttcttttggaatgaagcttcatccccaagaaaaagtgacgaactatcggcatcaaacatggtgtttccttcttctctatcatacctgcaaaaggatatgccagcaaggaaagttgagacaacttttcatcagacctcataaagcccagaatggatgacagaatcaccaacaatgaccagtcaaaagccaccgtacagaattactattaatattctcattttcattttacagtacaataaattttaataccctatgaagaaagggatattaggatgttcaacctaggatgaattaatttaccatgcacggtctgaattatactccatctccaagcgcatactttctgtaatctcataattgtgttcttctgccaaactgttcttatccgcttcatcctatagaataaacataacaaattatgaccaaatattaacattggcaaacataaaaggattaccatcaagaggg

SEQ ID NO: 14560 - DNA, 686 bp, Gossypium hirsutum
ccttggtcattggctataatttccacgtgaccattcttgtatacaccaacacaagaatacgttgtgccaagatcaattccaattacggtccccaatttcgcggcttcctcctttgcaatcgagagtgcaaaaagacatcctgtttgaaaagttaacacgatgctaaccattatacagtcctttttcaatatcactctatggtcatttttaaactcaatcattatgttagccaaagttatttaaagtcactatccattgaattagacatcaaatatcaaatttggtaaagcggccacgtggaaagatcaagatagaacagaatcctaaccaagttctagaatatttacgctcataacattgcaacttccatcttagaaatgcttcaccacaaatggaaaattaaaataaaatacgtgaaaacacatgattttgttcgaatcaaactaatttccgagacattaatttcataatccagaaatttctagttctgaaatcaatggagcaaaaacaaatgatatgagatcgccgaaactctcatttgatgatgtaatgcattacaagaatccgtagaacctaaatcagatctaagcatgcaccgatttgggaggaaaaacatcatcaaacaaaactagatctaacacgtttcgtctcaaacagttaaagaatcagagaacacggaatcacaa

SEQ ID NO: 14561 - DNA, 655 bp, Gossypium hirsutum
aagatgcctgtttgaaatgcatataaacacactaagtcataagtttcaagagagaaagggatttagatatacttttaaccatggataaagtaacaaatatccggacatggctaccaagatacgatcttagaaattaaacatactggtatttaacacaaactcgtgaccaacactcacacccagatgtgaataatatagcataagaatttttactcctttaaaggaaaaaaaaatcattaaaaagcaaccaaaccaagtttattccaaaacccaaatacaagggagaaagaacatgaatatccactatcccataaaaaaaataaaacaaaaaaatactattaatagcatgaataagcttttcatgatttatgttaagcttattcgagggaatattggtgtatgcctaataaagatattattttttgtaatattttaatagttttagacaaccatattcatattcatagcatgtacacatgtaaaagatatggatatttatatatatatataatacgaagataatactgatctccagctaaccaaaatatttagtaaatcatgttaaacctttccattacccagaaagtctaacattaataataacaataatgatgattttctcggaatattagaccaaagctagacaaccctaaaa

SEQ ID NO: 14562 - DNA, 512 bp, Gossypium hirsutum
attttatttcacaagcaacaatgaaattgcattatctattcaagcataaagtacgtaaaaccaaactcaggacatatatgtcagattttggtttgttaaactctatagccaccagattctattattttaaaaagaaaccttagtcaaatccgtcaaacaatcaacaatacatgttaaatattgaagttctgtggaatgaactgtatgacctttgaaaaaatttttcattttattaatacagacttttatgtttaggaaaacatgctcttctcgactctttgtgcattgttcacaattaactcattgtccattttctcaagattgcattatagttccattcctttcacagaaaagacacatcaagcaatagatttacaattatacttccaacaaccttgtcatccattgtttgataaagcagtcctattcaaatttatctaatgtaaaaggattatactatatcacactttgttttcttgataccaataactgtgaggaagaaagagggcaaa

SEQ ID NO: 14563 - DNA, 682 bp, Gossypium hirsutum
tgattactggtctcttgctgaagggtgaatctcttcttgcttgcctgaccctggagaagatgctgaagagttcacatctcccacagacatcttctgttcattccatacttgcagaacttctgaaaaagagttgtgcccaagaagcagccagtttggtaactctaatgctggaccatagaattagactgaatatcaatctctcgacacagactgtaaagttgctgcttgcaagacggatgcaggataaagcttttcaagttcttgtattactatatgatgacggctatatggttaagatggaagacttggttcatttcctttgccagagtggaatgcttttggaggcgtgcaagatgatacaatttagtttggaaaagcaccaaactgctgatattgaaatttgctgcacggtcatagaaggtctttgtaacaacaggagactttcagaagcatttggtttgtactatgagctcgtggagaggggtaaacatctagagttgagatgccttgacaatttgaaaatcacattacaagctggaggacggctaaatgaagctgagtttgtatcgaagaggatgccaaaccagtggcaggctaatgatgcttcgtcaaaattcagcaccaggatgccaaaatttcagcagcaataattccttcggatgtctttatttgatccaaaaaa

SEQ ID NO: 14564 - DNA, 1129 bp, Gossypium hirsutum
  misc_feature (613)..(615): n is a, c, g, or t
  misc_feature (659)..(661): n is a, c, g, or t
  misc_feature (665)..(666): n is a, c, g, or t
  misc_feature (671)..(672): n is a, c, g, or t
  misc_feature (687)..(690): n is a, c, g, or t
  misc_feature (695)..(697): n is a, c, g, or t
  misc_feature (708)..(709): n is a, c, g, or t
  misc_feature (719)..(731): n is a, c, g, or t
  misc_feature (737)..(740): n is a, c, g, or t
  misc_feature (744)..(748): n is a, c, g, or t
  misc_feature (750)..(751): n is a, c, g, or t
  misc_feature (753)..(760): n is a, c, g, or t
  misc_feature (762)..(773): n is a, c, g, or t
  misc_feature (775)..(775): n is a, c, g, or t
  misc_feature (780)..(784): n is a, c, g, or t
  misc_feature (790)..(790): n is a, c, g, or t
  misc_feature (801)..(801): n is a, c, g, or t
  misc_feature (811)..(812): n is a, c, g, or t
  misc_feature (815)..(827): n is a, c, g, or t
  misc_feature (832)..(835): n is a, c, g, or t
  misc_feature (837)..(845): n is a, c, g, or t
  misc_feature (855)..(857): n is a, c, g, or t
  misc_feature (859)..(861): n is a, c, g, or t
  misc_feature (863)..(870): n is a, c, g, or t
  misc_feature (875)..(885): n is a, c, g, or t
  misc_feature (887)..(894): n is a, c, g, or t
  misc_feature (901)..(902): n is a, c, g, or t
  misc_feature (904)..(907): n is a, c, g, or t
  misc_feature (909)..(921): n is a, c, g, or t
  misc_feature (924)..(929): n is a, c, g, or t
  misc_feature (931)..(937): n is a, c, g, or t
  misc_feature (955)..(955): n is a, c, g, or t
  misc_feature (958)..(961): n is a, c, g, or t
  misc_feature (964)..(967): n is a, c, g, or t
  misc_feature (969)..(969): n is a, c, g, or t
  misc_feature (971)..(974): n is a, c, g, or t
  misc_feature (983)..(987): n is a, c, g, or t
  misc_feature (989)..(991): n is a, c, g, or t
  misc_feature (993)..(997): n is a, c, g, or t
  misc_feature (1008)..(1021): n is a, c, g, or t
  misc_feature (1023)..(1036): n is a, c, g, or t
  misc_feature (1041)..(1043): n is a, c, g, or t
  misc_feature (1047)..(1049): n is a, c, g, or t
  misc_feature (1051)..(1055): n is a, c, g, or t
  misc_feature (1057)..(1064): n is a, c, g, or t
  misc_feature (1067)..(1071): n is a, c, g, or t
  misc_feature (1074)..(1076): n is a, c, g, or t
  misc_feature (1082)..(1088): n is a, c, g, or t
  misc_feature (1100)..(1103): n is a, c, g, or t
  misc_feature (1107)..(1110): n is a, c, g, or t
  misc_feature (1112)..(1112): n is a, c, g, or t
  misc_feature (1114)..(1119): n is a, c, g, or t
  misc_feature (1121)..(1125): n is a, c, g, or t
tcgtgctcataaggatgtgtcatctcccgatatgattaccgatacattttctctttatgatactaatgttattgcattgatcgatcctggatcgactcattcttatgtttgtgtaaatttggtatctagtaagaattttcctattgagtttactgagtttgtgattaaagtgtcaaacctcttatgaaaatatgtgctagttaataaagtttgcaagaattgtcctttgatgattcgaggtcactgttttccggctgacttattgttgtttccatttgacgaatttgatgttattttgggtatggactggttgacactacatgatgtcatagtaaattgtagatagaaaactatttaattgaaatgtgataatgtgttgaatacaaagatgtctgaattgaaaattgcatcaatgttagtagtctgtgaatataaagatgtgtttccagaagagttgcctgggttgcctccgatcaaagaggttgagtttgccattgacttagtacctgggacttcaccgatatcgattgctccgtataggatggctctaactgaattgaaagaattgaaagttcagttgcaagagttgacagataaagggttgtgcaatttnnnacctgggacttcaccgatatcgattgctccgtataggatggctnnnactnnattgnnaaaattgaaaagctnnnntgcannngttgacaaatnnaggggttgtnnnnnnnnnnnnnttttcnnnntttnnnnntnncnnnnnnnncnnnnnnnnnnnntnctttnnnnntcttgntttctcgcttnactcctcctnntcnnnnnnnnnnnnntatgnnnncnnnnnnnnntatttttatnnncnnncnnnnnnnntattnnnnnnnnnnntnnnnnnnnttttctnntnnnntnnnnnnnnnnnnnccnnnnnncnnnnnnnccctcccccccctcttcnctnnnnccnnnnantnnnntttttttcnnnnncnnntnnnnncttatcttctnnnnnnnnnnnnnntnnnnnnnnnnnnnncctcnnncctnnntnnnnnannnnnnnnctnnnnntcnnnctcccnnnnnnntcgccactcttnnnncttnnnncncnnnnnntnnnnntttt

SEQ ID NO: 14565 - DNA, 626 bp, Gossypium hirsutum
cccttcaatggctttcattagtgtaccttcttcatgcatttgccttatttcatcagctccaccgatgtactttttcccaataaaaacctttggcaatccaccacacccttgatcccccattaactcttttaattcatctttgaaccctgaatgcattgaaacatcacgttcatcgatacgaacacctaaggtgttaaggattaacctaatatgacaacaatcctcgtatgtctttctaacacctcttaaacttgtgaaatataaaacaagtttgtcttttttaagcctgagatgaaaagggttagcagaagggagttgttcaagtgttttcctaaagctagaaatgatttcaggatcgaaatctgtgattactgaatctgatttttgatcctcttcttcttcttcaaattgaacccataatggcttttgagacactgtgccatttgaaaagcttctaatatgagatggaggacgaggactaaggtcttcaaggccagccattaattcccatgtgttaattgtttcaggctcaccagggggagttgcaataggtgttttggggataacttttgggatcttatcttcaatcattttggaccaaacttcagcttcaatcatggacaatc

SEQ ID NO: 14566 - DNA, 631 bp, Gossypium hirsutum
ctattacttaccttcccattttttttttattttcagtcaaattttgtgagaatcctcgactcgtgtcgcctatgtaccacccttcacctctttgaatgtaccattttggtacataattttttaaacatgtcattacaatatttttattttattatacaatattcaggtaaaaacccaaatttaaaatattggactttcgtttatatttttatttatttctttttgatagttgtcttggattttaaatttatggttaaatgttacagaagcagtttttcaaattttatttcttttcaattatggtttggcgcaaattcttagtattttatttcaattttctttaaattaattactgaagatattaattaaaatttgagcttcggtaatcaacagccaaaagagaagcagggaaggaagcacaaagtagaacgggaaaaatgaagctggaagtgtatgctgatcgaatgtcccaaccatctcgcgctgtcatcatcttctgcaagtaattctcactttaattttttttcaacgcctgtttcgcttttataatttcgcttaatttccttctattcttctttttttgggtaattttagggtaaatggtataaattatacggagcgcaaggaaaaa

SEQ ID NO: 14567 - DNA, 461 bp, Gossypium hirsutum
  misc_feature (28)..(28): n is a, c, g, or t
  misc_feature (400)..(400): n is a, c, g, or t
  misc_feature (415)..(419): n is a, c, g, or t
  misc_feature (425)..(425): n is a, c, g, or t
  misc_feature (428)..(430): n is a, c, g, or t
  misc_feature (433)..(437): n is a, c, g, or t
  misc_feature (439)..(439): n is a, c, g, or t
  misc_feature (443)..(454): n is a, c, g, or t
  misc_feature (456)..(456): n is a, c, g, or t
gatgggtgacggtggtttgcctttgacngatgattttccccccaaataaaggggtcacataggggatgattcgcatcggaagcattacaccgataataattcgaatgattgctagtactatgcccaatggcatccatgagaggattaatagagcggtcaaaggtgttggccgcatcacgagacgaccgtcatgaaagattacgggtagtggacgagggagttggtggtcgtggcaattttcgtcggtgataaatggtgggtgcatttgttcctgcatgtcaataatctaatggttaggatcaaattatttaaaaaatataaaatgcaatggatttaaacacattgcatgaatttcttaccttgctaaaaaaaaaaaattgaaaacttgacctaactcttntaaatcctaaaaaannnnnctttcnccnnnctnnnnntnccannnnnnnnnnnntncactt

SEQ ID NO: 14568 - DNA, 547 bp, Gossypium hirsutum
tttgtttcaatggttaacaccagtagtattaatttgcagttacagccgatgccctttccgatagtgaagctaaggatacttatggaaagcttcttgtacgtcattaatcgattaacatttttttatttaaaaatatatgtaagaaaaaaaagattggggtatcaaactttggggattttacagggaatggcgttcaatccagttccgtttcaatccttagaggatcccacgcaacctccaccagcttcaaatgctgccgtctctcaacccaaaggatttgtatgatttcatttcacttccttttttctgttagtgtaatttttggtttttttttagtaggttttcactaagcaaagagatcttattgcagggaatgataacttcctccctcaaacacatttttctacccaatgatgtgagtttatcatttccttgttgctttatatgtgtatgcattttctcaaatatacatatagtgttggttttagcattttattggttgttaattggtgagcctgaatgacggtttaagttgcccagtataatc

SEQ ID NO: 14569 - DNA, 501 bp, Gossypium hirsutum
gttgggtagcatggagaactggcaatggactcaaagttatgatgaggggtttcggtatgggtagatgacgaccaacttggtagaggcgattaactctgtattgaggcgcacacgccatctcccgatttctgctgtgttctcggcaacattttataggttggcaacattgatgcccaagatggggttgagacaagctgtatgtattagcaaattcactaatatttctagtcgcgcctctgacataggcgcaacctgtattcgtatctatacgcaggtcatactgatccaaaaataaaaaaataatactttatttaaaaaaattggtaaattattttttttaaaattatttcggtaaaaaaccctttatctgaaatggaaatgggaatggaaatgaagttagaacgaaatgaagttgaaatgaattaaaattaaaataaaatgagatgaaaatgaaaagaaatgaaaaaaaaaaaactgacaaaactaatctgcaagctaggc

SEQ ID NO: 14570 - DNA, 652 bp, Gossypium hirsutum
ctgacacccttaaccaaacaacacagcagtgagtttggcaccatcttttctttcaaaacgtgcctcactgcctcactgcctcaatctaaaggagcccttagtcactttagtgaccattcccctaatctcccataaaacatcatttttgtataggtaactgggaagccctggaaacctaatccaagtaagaatcgtgttaggatatggtgatgccgaatcgaaatcaaaagtctagggttgtactattaaatattgccccaaaataagccatgacccttgtgaaagaattgttttcataatcgttaggactttgaaatttagttaagaaataatcgttttcaatgtccatcaattgaaaagtcttagaaggtctccagattccatataatatatcttgcagagccacaaatccgatgtttcttcccagtaacttaagaaccactgaagtggacatttctttaacaagtagttgatgttctctttccgagaaatcaataaagggaataccattagccactgatttcttaacatccccttcaattagcgagaaccctccgtcaacaaaatggtctccactgacttcattcaactcaagagagcttttccccaataccaaatcattcctagacagagttggtgttggtgttgatta

SEQ ID NO: 14571 - DNA, 561 bp, Gossypium hirsutum
ctcgaccacccacagaaatgatcttttttctcttatcattttattgatcatcagaaaaatatacaaactcaacaacagatattaattcatgggcatttgcccatgcttttcaaaacttaaaatggttctcatttcaattctatgatctggtgcatatattcataacatccagaaatacaatcattatcgtattaacatatgtcattcttttggttagttctgtcattatttcatcttcatcgttatgcctaagcttctagacatgaaataacaaaaatctttaaggttgataattcacatgaatgagccagagtgccttctgttcgtgctacttgtctgatacaaattattcttgtacttgccttgcatctgcttgctccatatttagataacatattaagataaaaggaaaaaacaaatagaagtaactgaatgttgcagggttacgtattgagcttctaacttgcaaggtgttttatttgtaacgtttgatattttgttactttagatttttattattattattattagtaatattctatcctactcgtttgggtgaca

SEQ ID NO: 14572 - DNA, 467 bp, Gossypium hirsutum
ttcatagtcaggtcagatcattgtatgataataacataatttatactcgtcaaagtctattcctatttataaatgtctaattgaatcatattttagtccttcccctattttaaaaaaaaataataacaattaatttatgtgaatttaaaatttaatatgtaatcatttcatacttgttcttttattggaatcttaaacatagacaacttaagatatttttatattatagtattagatattatgatatatttactttttatatgatataaactatataatatatatggtgaaataaaataatacattatatattaaaaaaaaagggtgatgactactagagaccaaactgtcacatattttaaacaaacttaattttttttactcaattccattttttagatctaataattttgtccaaaccctctcaaacatcaagttgaacttcaagcttagataataacctcgcc

SEQ ID NO: 14573 - DNA, 660 bp, Gossypium hirsutum
  misc_feature (617)..(620): n is a, c, g, or t
  misc_feature (622)..(624): n is a, c, g, or t
  misc_feature (626)..(626): n is a, c, g, or t
  misc_feature (643)..(649): n is a, c, g, or t
tggatgacaaaggataaagttgagataaagcacacctcaagcattattacccagcacggctgttgctccacatctcctgttaaaaacaagaactagtttaatttctttcttcatgattgctaattcaagacaagaccaagctaataagatacacatatcacctaagaataatttaaggtaacaaggttaagaagcaaacatagatgccacaaacttgattctctttcttttgctaataaagcatgcaaactacagaatagtgaaaatgtaccatgcatgagagagagagagaacacaatgctttttctgtctatctgttttgcgcagaaaactgtacttatatattcacatacatgaagatcaatatgatcattcatttctacaagttcagaggctagaaagaacaaaagaaacactagaaaataacatcactcagaatcttggtagaatagcataacaataaaacatggaataccatccttgaatatcgtgtatatatagttcaagtagaaattaagcaaataaaactcaaaaaagttcaatattgaagaaggcctaccccatccactcctgtccatggcatcccggtgttctactttaaatatattgaagagggnnnncnnnanccactcgtgtccgtggnnnnnnngtgttctacta

SEQ ID NO: 14574 - DNA, 313 bp, Gossypium hirsutum
aaaggaatgcctagtgttatgacacctaacaccctttcagggtggataacagctaccataaatgcaggcactgctccaaaatccttcccaacaagaaaaacctatatgttttttttccatatggttaaaagttaatttgcataattaatgtataaatgcaacatgattttaaaactacggatttattaaattcagttccggccaaacgaatgagacaaaaatcttgaatttggtatcaagaatgaagaaaaggcagatattctgcaaggcaagaatacaaacaaacaagaaaaatgaagtaatggttacctta

SEQ ID NO: 14575 - DNA, 609 bp, Gossypium hirsutum
ctgagatgggtaaggcttgttatttttgtttttcataataaaatccagtccaattttatccctaaaaaacagaataccaacccatagaagagatggacaaatccgtgattttcattttctttcccttttgctttcatttaataaaaacaaagtatctttttctttcattttcacattttaaaaaataaggtataaatatactttcaatatatatatttatctcatatttagtatttaattctttacttttaattttaaaagtttaatcgctttattcatttaattttaataattaaacttcaattaataatattataaaataaaattaacttgaattatgtgacattttaaaatttaaaaaaaattattcaaaaaataaaaataaaaacatttgacatttttatttattgatttaagttttcacgcatatcatatttcacatttctttattttaaaatttcatacattccaatctaactaaattcatttgacatcaaaggtggattaaattttaaattttcaaataagatagggactgaaagcaaattagaccgaaaataaataatccaattttcttcatgtctcctacgtttgcgatataacgggaat

SEQ ID NO: 14576 - DNA, 557 bp, Gossypium hirsutum
ccttgttgtttgaccattcatattcgctgattcatgcagacacttggaatagagcatgctttttcttcgttcatttggctctgtggtccaataactggtcttgtggtaggtgatgggaaccatattacatataactttatattggtgccctgtttattattatggtggtgcaataattgatgtaaatgactacactcaaaagattgctatctttatatgtgatctattgagttgtttttattttgatcttaggttcaaccttgtgtcggtatttggagtgataaatgcacttcaaaatatggaaggagacggccttttatccttgctggatcactcatgatctctctttctgtaagcatttaagtgttacataattcattcttatatactatgtttccgggttttatatctgctaaactaaattttgtaatttaggtgataataatcggattttctgcagacattggatacattttaggtgatacgatggagcattgcaggtatcattttctgctttgatttcttctattcttttctagcacctcctcctctctcaa

SEQ ID NO: 14577 - DNA, 572 bp, Gossypium hirsutum
  misc_feature (514)..(514): n is a, c, g, or t
  misc_feature (517)..(517): n is a, c, g, or t
ttttgtttagcgcccgcctttttttccctctcacaattttttttatttttttttcattcattcggtgagttttctctctttttaatttgcagatatattttgcgagtattttttgccatctttacaaatagtgatgaatagatgatggtgtttatcgttgctgaaactccactatccaccagcaatttctttgccatcaacttcttaatctgtttctttttttaaagtatttcagaataacctatagtgtcttttaagttttatatgtttttttatttgttttatattgtttagtaagttttcgtttttttgaagttttttttttctgctcttgtaactcttttttggtgttgcttgtgtataaagtcttatttatggatttagtcttgtttttgtaagtgattttagggatgattttgcatgtttttcaaaaaagcatacacctattgctttggactattcggggctgattttcttattacattaagtaattgcaatcactctagatatattnggntaagttgttacaaagtcaattgtcaatataccataatgttttattgatgctgaag

SEQ ID NO: 14578 - DNA, 663 bp, Gossypium hirsutum
tgaaaattgtgttttagagttggaatagaaagaacttacaattttaagaagatcagcggttgcagcaagggatctcgccccactttggcagccctgtaagaaaatgaaactagttcagcccacttcaactcccacatcatttatatatagaaactgcaaaaaagaaaaaaaaaagatgaaatccaaatttaccactatgagacgatcttcctccttgcagagagatgaaacctccttcaagaactcaggattcttcaccctacctgcagcgccagaattaatactctgtataaacgacaaaatttaaggacgaaaaaagagcttgccagaccttctggtgtgatgaacaagtatgggatgttaagaatattcgctgcttccacatgtcccttctcgaattcttccactgtcctgttgtcaatggaaatgaatctcaaatcataaattttaagaaacttcaatagaattctgttatgtttgttacctgacatcgatgtaacggtagcctgactgcagtaagttttttgcttcattaacatgaatggtaacaacttctgatcctgagctgaaatatataagagaaaaaagaaagaaacaacaagggaagaccacaaaaaaaacacccatatcaaagttttgccccaccaactacccttcctaaaa

SEQ ID NO: 14579 - DNA, 375 bp, Gossypium hirsutum
ttttgctccctttactaaaaaatggataaattaactcctgtgcattagattaaagtgcaatttagttaattttgttaaaaataatttcatttatttatattgtttaaaactggcttatctggcaaaataactaaacaatgatatatggtgtgtcacatgtacgttacattgccatgcatagattagtttttaaaagtagaaattgataaaaaaaattttaacaaaataactactttaatctaatgtataggaactaatttacttctctgacttttattacaaggcctttatgctaattttaccttcctattcttatcatcccaaagttgtcatcctacaaaatgctttgcctgacaccaatttgcttcaacaaaa

SEQ ID NO: 14580 - DNA, 667 bp, Gossypium hirsutum
ccaaaccacagctttcttgtattgataaagccacagtagaacacagggaaccttgttcctttgaactaaaaagaatatccacaaccttgtgggcagacattgtgctgatcccattggtcaccttgcccatcaatgaagagtatttcttctcaaagcagactgaagcacttgcattaagaattgagagtaaaaatggaataagaaacatacgataccccagtcagaatgatactacttgatctttcttgggcataccattgatgaggtttcatctaatggcagttcactgaaaagaccagcacaacaactatatcaatcaaatgcagtagatacattcccagagggtgtacataatcaaatatccacagccaccagaaaggaaaatggtcttatgacatgctatgtccccattctcattctgagagagagagagagagagagaaagagatacgtatatatttaatcttttttgtatggttttagttgagagcttgagatagtttgagataagtgataggtttgctttaagcaacttgttgacagaaaaaatgtagtaagagttgctaatgtttggtaaggacttatgtaaaaagtatgtttttttagtgtgtatatatgaatgaagagctaagttaaacaagctatcctagcagaagaggggtgatgt

SEQ ID NO: 14581 - DNA, 608 bp, Gossypium hirsutum
ttgtgcctttaatccaaggttttgaactactcattagcccatatgcattcttaatttgtctcttatttaataatgcatgtgcattgctaatgtttcgtcctttctcatttgattctattgaaatttcatcttgagaaaattcttgcactgttaagcacccaggaatcggtaccaaaatattggaaaaatgaattaaaacttatagggtgccaaaaggttaatatagcaaagaagagggcaaataatttatagagtgagaatagtaactgataacactatagttttggcaatccaaaaattagaaatattgtagtaacagaagagaagggaagcttagactgccagagtgttaatgtagctccttgaaactcaaggcatatggagattatataaaaattacttcggttttattagattttccttgaagattataggatggaccattgcttatgcaccttgtagtactgaatgctactcttggaaatttactgagaaatatttagatcctgtcaagattgcatgagaaatatgaagtaaaatttcagtactgattctggccactgcaaataacgattcacttatttagacttctcccgggattgtatgta

SEQ ID NO: 14582 - DNA, 671 bp, Gossypium hirsutum
ttaaaccgggtatttcatgcagtaatcatctatcatcataagaaatgcaagtcatttcttcataaaaatatattatttattaagtcaccatttataaacactaattttctgggcatgcgtattttaactagtttgatggtctttctaaatattcttggattctgtgttcttcaatctgcattaattatgatcctcatctttctagccggaagaaacttgaaaatgaaatgtcatctttttatgtaaacattgggatcttaaattcctgataagggtgaagctcaaaccatggcttatctatgctaaaagatcattctgaagaagatgacgataaatacaatgacaacgacaaagacaattttctcttttctataatagcaaaacattaaaaaaaacaaataaaaaaaactaaattaaagaactaaattgaaatatatgagatggaataaaataataataataattagtttatccattgagcattaatctcaaaagtagtatcaatgacaatgacgagccagggttacctggtaagagaataagatagggaaagtgaccggccaggtttccctcgaccacgaacatgagaattagatgcttcttaacgtttacatcaatttcgttgcctattttttgtttgccagctttgctcggacttgctgtatggaaac

SEQ ID NO: 14583 - DNA, 407 bp, Gossypium hirsutum
  misc_feature (314)..(314): n is a, c, g, or t
  misc_feature (319)..(319): n is a, c, g, or t
  misc_feature (321)..(321): n is a, c, g, or t
tgatctctctttcccatcaaaaaagaaggggaaaaaaagaaaagataaagggaaaaaaatgggcctttaatttatttaacacattggtcagttcgagaaatattcaacattcagaatcttgttgaagggttaaagcttacactggtggtcttttgtttcccgtttctaagaacagttcaacaacccacatcctgaacaaccccacagtttaaagcttggactattggatgatgtaatgacaaacaagcagcccatgttgctttgtgtctatcttaatacccttttatcctcttttttttttctttaaatttccnttttnantttcaaaaggaggcagaattcccaagtaaaatggacccccttcctttccaactaatggtccggccttcccaagcccggtttgtaaa

SEQ ID NO: 14584 - DNA, 546 bp, Gossypium hirsutum
gtaaatctaagtgttttatttttctttccttttctttgctatctttctacattgccattagcgacgtttagttttaacaaattggtatcagagcttttcaggttacttgtctcaatcacagtaatgacgaaaatgaagtatgatattttgttgttggatcgcaacattctcattgtggcaaataaagatgtaggccgttcttgcacagatagatttggaggatatgccctattaggtttagataatatgcattcgacattaaaggaggaagagaagaaacataaagatcgaaaggctttaacgcaattacatatgcatctatcgaatgaaattctacaggacatgataaaggagaagatcgtcgatgcattatgggaaaagttgaagcaattatgcatgtcaaaaacctaactaacaagtttcatatgaagaacacctttatgctcattgtttgaagaaggtctgtctgtgcaagaacggcctacatctttatttgccacaatgagaatgttgcgatccaacaacaaaatatcatactttattttc

SEQ ID NO: 14585 - DNA, 364 bp, Gossypium hirsutum
ttacagaacttgcagcaacaaaagagggaaaacttactcttcattcttctgacaatattcaacaggtacccaaaaggggaagggccatagttcattttgatgcagtcttcgatcatcagggtttcagatcaacttcggggctaatagtatggaacgaggaaggggaaattcttgcaacacaagtagttattcactccaacattgcaaatccattcactgcagaggcatatgcaggattacaggtaataaaactagggattgagttgggagtcaacaaaatagaagttatgggagactcgaaaactgtcatcaagaaatgtcaaagctctaatacggataaatcggtcattggagcaataatcag

SEQ ID NO: 14586 - DNA, 618 bp, Gossypium hirsutum
  misc_feature (60)..(61): n is a, c, g, or t
cttttcctgtggagcagtggcagaggtattagcaggcttattatttctcttctattgganncttttttgtataacatagggtcatatttgtgttgaactttgagtctgaaggctttggttttttatatctaatgtgtttatggttgtatgcagaccaagatctcccacttggatattgatggtagaccagtagttgtgctaaaaaaaactaatgttgtgcctgagcacaatcaattttttcaggtattcttctttctcaattttcagtctgaatatgcacactgcttctagcatactagtgtaatgccaccgttctgctacctccaaacacagaatattggacatcaggttttcataatcctatatttacagggttaatggtttgctgtttgtttacctttcaggtctattaccatttcagtcaactatcgatgctcagggagccactgatgttaatttcagggtttttcttcttttttgttgcttgcattgtttatatgcatgcagacatatcaatctccaagtcttctgcttcttatttggctaaacagcagtgggaagaggttagtaggatgttactatgcaatctactttgctcacccaaatcaccatgtacaa

SEQ ID NO: 14587 - DNA, 687 bp, Gossypium hirsutum
cttacttgttatgcacacgacgcaccattaacaccactgttaggggtgagtattcgactgagttgagtcgaatcgagtaaaatttttttgagtcagtcgagttgacaaatcctattttagcaaccgaactcaatttgaatttttttcgaatcgaatcgaatcgagtcaaatcgagtcgagttaacgaatcctattatttatacttaatgttgcgtttagatggactgattatttaactagtagacgaagtataatattatttaagtatatgaacaatataatgattttgcctttttatttaataggtaaacatttatcaaagcgacgtaattttaccttttaacttaattattttgaattttagctttaaaaaaagtaaacatttatcaaaacgatgtagttttgtcttttcttattcggattttcagacaactcgaattgtgtaattcatattcgagttaaactgaaaaatttacttttttattcgagttgatctgaataacttgattaactcaaataactcaaactatttaatttaaaatttaaaatttttatcgaatttttcgaatcaaatcggattttgcttatccctaaccattgccttgtattttgattaggttacgcggcaaaatatgattgggtgttggcataatgcacctcggcgtaggttaggattggtgggctaag

SEQ ID NO: 14588 - DNA, 690 bp, Gossypium hirsutum
  misc_feature (611)..(611): n is a, c, g, or t
  misc_feature (614)..(624): n is a, c, g, or t
  misc_feature (632)..(632): n is a, c, g, or t
  misc_feature (637)..(651): n is a, c, g, or t
  misc_feature (658)..(663): n is a, c, g, or t
gatccaaatcagtaacaagcagtttatcaaacatgttaaatatgtttagtacatgaattaggaactaaaaatttaatctgttgttcttttcgaagcacattggtttgatggatccaaatttggctgaaattttggctatcagagaagctgttagcataaatgccactattaagatacaatgcaactagagacatgggagattcaatgccattgcagagcacatgttgatcagtaccatatattttattctcaagaaaataaaaaaacatggcagattccgacaattataactttattttaatgagtggacaataaagactgtttgcttgtgaaataagcaaacgattaaatttcaaatcaccaaacctttttaaaaagcagataatcccagagtcatggtgttgcttgctgtttttttcatgcacgattcatttagatcacacaaaatctcaagatcaattaattccacccaataataataatgtcaatgatacaaggatatacattctcatacgccatacgccatacgcttcggtttcatgcattcaaaggtataaaaaggaagatgaaatcctcccaaagtttttactgatgttatcggaggtggaacnccnnnnnnnnnnntcctttcnctacnnnnnnnnnnnnnnncctttcnnnnnnccccccctccccccccccccccccccc

SEQ ID NO: 14589 - DNA, 653 bp, Gossypium hirsutum
ctcatggtttggaacaactcatatttaaaacagttatgtttttccaaaaaaatcattattcaaaataggctttaccatgaaaagtataaccacagaacaactcttttttggaataatctctacattgagaacaactcacgtttaaaacaagtcaaaataactattattcaataacaactcttgtaatatcccgaaaattactattgaaataccccgaaaactactacagtaagaaattaggtatcattgatatagtaaaataaagaaataaagtgacagaaagggaaattttgagttatggcaacattgggaggtatattatgatatattaattcaagaaaggattaaatcgcaaaagtgagaaaaattttgttgaccaagagtaaatactcaaaatttgaggggataaagtgtaaatatgtaaaagttgaaggaccaatagtgaaaatattttaagggtggaataatctagaaactaaggaaaatggatgaattagggccaaattgaaaaggtaaaaaaattttagggactaaatcgtaattttaccaaattaagtgatgactcaaggatggaatttttaaagattatgaagggaaaaatggtcaattagagagagagagagaactctggaaggtaatgatgatgttggtga

SEQ ID NO: 14590 - DNA, 390 bp, Gossypium hirsutum
  misc_feature (240)..(240): n is a, c, g, or t
  misc_feature (249)..(249): n is a, c, g, or t
  misc_feature (251)..(251): n is a, c, g, or t
  misc_feature (255)..(255): n is a, c, g, or t
  misc_feature (257)..(257): n is a, c, g, or t
  misc_feature (326)..(326): n is a, c, g, or t
  misc_feature (328)..(329): n is a, c, g, or t
  misc_feature (332)..(332): n is a, c, g, or t
  misc_feature (344)..(344): n is a, c, g, or t
  misc_feature (357)..(358): n is a, c, g, or t
  misc_feature (374)..(374): n is a, c, g, or t
ctaatcacagaaaactctctagcaatattttcagcggttaaactcagatttatagaaacaacactagctatgtacgagtgagtagagccaatatcaatgagagcataatacgaaacagaatgaataaagaaggtacctgcaatgacatcagcatcatcgctctcctcgcggcgtctcaccgcataaaccagtatcggctgacgagcctcagtctgacctgcacctttacccggtgctatntgtcctctncncgancnattaccgcctctaccagtaccacgacctttaaatggttgctgaacctctctcagaggccgaacagaacntnnagncgaagtctgtgncgcagctggcacnnaatctggtcgacgagngcaatccctaactcga

SEQ ID NO: 14591 - DNA, 395 bp, Gossypium hirsutum
agaaaaattagtgtgaagaggaggaatgaatctagggcggtgggcggtggcccttggattttttattttctttttattattttcttattggctctttacttttcttgcctttatcgagccttcatttttcttaattcctaaactcaaaatattaatatcaagttaaaagtttaccaaaactcaagggtgaaataaaaaaaaaaatttagggttcaaatttaaattataacttttacaatagtaaaaatataatttcactatcttaatagcttatatttttataatttttaaaatgttaaatcaaatttttattatttttaaggaattaaagtgtaattttatttttactaatttaaaattttaaaaaatataaaaaaaaattcatggaaaccagg

SEQ ID NO: 14592 - DNA, 608 bp, Gossypium hirsutum
  misc_feature (55)..(55): n is a, c, g, or t
tcagatcttataaagtactctagagtaagatttctccaccttctattctactgtntttgtttttttaatcattggaatgataaattttaccatatgaattgggcattgtgctatctggatagtataatcatgtaataaattgcttgacaaaagatactcaggcagaaaataggacaattatacttttgtagttgtttttgtacatggcaaattgaacttataatcctggtcatatgtaatatgcaagatgcgagactgaactccacaaagaacggggaattcaatctgaattttggctgtctataggctttttgttgcataagaatcagtttgaaaagtattaaagcatgtacagaataagtgatgaattggaaatccctatgtttcaataatgccattcaatatagatataacgagcataccttttttgaagttttttttttctgttttaattaattaatcaattcatttgggataagcggtttaagtttctatcgtccaagaagcaacataatagcacgtagcagcaacaaacttacagttcttaaattagctagcagttaaaaaaaaaatatttttgttttggtgctatgatctcttatatcatc

SEQ ID NO: 14593 - DNA, 580 bp, Gossypium hirsutum
ccccacagaacatttgatggtacattattataatcaaaattattatttattatattagatctcatttatatattttcatcacaaaatcatcatatatatatatatatatccttcttgggattaggtcaaagggaacgtccttttaggttcctctttcatgtttataggccatcaaaagcatctcttgaacccccttttttctaatatgaagctgtttatattttcttcctctcatctccttcctttactattttccgcccaacaacggtgaaccactctcccaccaccttttttctttttggtttctccgatttcctatatcaacaattgatgcggtgaatatatatattttaattatcgtctaatttatacatcacattttctactgttacactttgcactgcacattttgttatctatacttttatatcaatacaaagttcacttattgaattaatgtaaccaattaatatactattgtaagggtaatgaaatcatttaatttttttatataatgtttttgttcaaaaaaaaacctatttccctaaaaaaatttaaagtcacgatttaccctacaaaa

SEQ ID NO: 14594 - DNA, 450 bp, Gossypium hirsutum
ttcacactgagcacatattcttgcatttgttaattcagaggcgtaaaagaaagataggagattgcttgatttcatcatctaacttggttgatgcctccataacattgcctaggaaaaataagtagttattttcactcacttgaagcaatggttaaggcattatatgtgaacctctgaaattgagaagtggagatctagagggaagagtgcacttaaggaggaggatcgaccagggaagttctggactatctttttcctaacattgatggtctttggagaaagattaaagatgtcacgctgttacaggtatatggagaagccaaagggatggatgatgctttggcatagacaggtcaaaaaagaggagttgtggctaggtggtgtctcagttagctagttcatattgcttttgcttattgatgtgctaatttggtccctcgtgttctgtta

SEQ ID NO: 14595 - DNA, 611 bp, Gossypium hirsutum
  misc_feature (597)..(598): n is a, c, g, or t
gcccacatgcataatgttgatctatctgcagatgatgcagttggagtttccagatctaccacacagaatgcgtgatcgtacaagttcgttattggattcgagtgaatttgaagttggtaaggagttttccaataaggatagttttcttggtgcattgaaacaacatagcatcaataacggtgttaactaccacgtggttaaatctaaatccgataagtttgaggcgaagtgtgcagtgcaagacggaacttgttcatggaaaatctacgcctcgttgaggaaaaggacagggttgtgggagataaaaaagtataaaggtccacatacatgtgctgcaggtacagtatttaaggtttttgaataatactgttattatgtaatgttacattatttaacgtacttcgttgacaggtatttcacaagatcatcccaagatggattcagctatgttagctagcttaatactacccacggtgaaggcagatcctaggacttcagtgccggtcttaattgccaatattcgtaaccaaatggggtacacgccctcttaccgcaaggcttggatagctaagcaaaaggctttggaaaagatgcatnntaggtgggacgct

SEQ ID NO: 14596 - DNA, 449 bp, Gossypium hirsutum
  misc_feature (398)..(400): n is a, c, g, or t
atcagccaagaaaggtacctttactctcctcatggttctctctatttaaagccagcttcgcatccactcttatgttagcttcccgatgtgggatccctccaacatcagagtttaaattcaacaccaactcttgccgccccctgttagcaaaataaatgctccttgcttgccatgggattcgaacccatgcctcccctcaaatgctccacacgctacttgccactaagccacaaggctttttgtgtcatattttatccccaattaattataagggctaaagggcaaagtccaggttcccttaaaaaaaccaaaaaaaattggaaaaaccaagggttgaaccccgggccccccccaaccttattgacccccccccccccaaacaacaagtttccttgggnnntttttttaaaaaaaaaatttaaaaacccccctcccaccctcccgggtta

SEQ ID NO: 14597 - DNA, 473 bp, Gossypium hirsutum
ttggttaagagacaaagatgctggaaagctggttctcactcgacagataagacagaagcattgttgctataaaatgattgaaagttgtccagcacgtaccagattataacttttcatttttcttttttgggttaattcataagaggtcctcaaactaggacccaaaattttaaattaatttttgaactttaaaatgtcttaattaagtcctttaagtataaataacgtatagtctaactgttaacttggacattaaatgccaactcaaatttgatatgaagtacacttaaaactcatgaactaaattgtaaaaatatatctactttttgcatggataacttagatataatgtgttataataacgaaaggtttcccttttcaattctattaccactattttattaaaaacatcaaatttaaattgtccatatagtaagcacatacatgctcattgtcagtggcatatctagagg

SEQ ID NO: 14598 - DNA, 606 bp, Gossypium hirsutum
tgtgtaactagtttagtcccgaaccttcttaaaaacatgttttagatctcgtagacatattttaaaggacaatgtgattatgaataaatgtgatatgatgatacatgatcaatgcatatgaaatgtttgtataatgatgtgaattgttcggtaatgcctcttaaccctagtccggcgacggatacgggttaagaatgttacacgagcgaataaataaataactaagaatgttatggtaaagatactacggcaaaggatagaaggtctacgatgttgattagaaggttgagattactaagaatcttcccttactttcaataatacctcaacaaaattgtacttaacctactgcccagaagagacctaaagtgacatgcttctcccgagagcaagatatcaagatacctagcatgtgtctataggccttagcacgacacttgttttgtcttcattctatacaaacactggtctatgtctagagtttggtgcagtattcggtcaaatacccactcttatcattcaatttcaatccaactaatcctaccttttcagaattagatttagcttctagccatactgctcactcatctatgtctagagaatgaa

SEQ ID NO: 14599 - DNA, 505 bp, Gossypium hirsutum
atttagcacggattgttgtcatcacctagagtatctgaagatgggtttcggagatgtatgaattcaccgtcgtctgtttcaaatgattctacaatgatgatggcaggggaaccaaactttgaagactgttcacttgcaagaatgccatcttttgatgctgatttactatgggagattcttgctaattagcatctcatcaatgggtttaggatttagtagtatttttttttaaggaacggtcactttggcctttgttttagtatgaaaggcattaaatttaggaaataaaaagaatagtaagcgaatctttctaaaattttgcaagcagcaaaaaataaatatccttatttactgctcttctagtactaagagacatatattgatgcaattattttgtacaaattgttttcagatcagtctcatatcctgtaagtagaatcagccacgcatgcactttcttggccaatggtgagaaagccacagagaaagaaattgtggtcctcat

SEQ ID NO: 14600 - DNA, 475 bp, Gossypium hirsutum
  misc_feature (39)..(39): n is a, c, g, or t
  misc_feature (41)..(43): n is a, c, g, or t
gagttggtttaaaataagaaaatgaaaatgaaatgaaanannnaatggatatgattaataagtaacaaaatttgaaaaaaataaaaataaaaagtatgaaccactgtctgttcaaaattggacttgaagggtgaggcaccgttcacaggcaccagtcaagagagaacgcatggctggttgcacaaaatccggagttgagaaagtagcggcacgaggttttgtttttcttgcggtttctttttccttctttttcactactaattaatccccctccctcttctctctctctctcacttcactccagtttcatttgtctataaagtagaagcccccaaaaaacccatttgaacctttcttcaaaaccacaacaaagattttttcttttttgaaaaaaaaagaaaaaaagtgttttttatagtgttcaaattggagatatgtacaattgaaagttcggtctggaaataaccagaaaaaa

SEQ ID NO: 14601 - DNA, 550 bp, Gossypium hirsutum
  misc_feature (257)..(257): n is a, c, g, or t
  misc_feature (514)..(515): n is a, c, g, or t
  misc_feature (519)..(521): n is a, c, g, or t
aagactagatgaatgagtggtttgtaatcctgggcaatttcgtatttcaggttcttcagcttttaaccttcatttatggagcgtgatttagtctaatccagtagttctaaagatttatgcgataaaatatgtggcagggaccttaaaaatttctaaactaaaaattattctaaataaggatttctgattgtagggcaaggtaaattgtaaatacggctcaaggataaacacgggctccttttttattttatttttcnaatttttgcttttaactcgggcaaaaagcacttgtgggcctgaggcgaattaatctggaaggcctaaaatgaaaagttttcaaggctaaaggccaggaatctttatccttttccgagttctttcaaagataattaatccttttggtgttgcaaagaggacttaaatttgtgaaacttgttttctggaagccagagatgtgggggctcggaaccctccatccccgtacctctctttgagaagtgataatgataaaaanncggnnnattttatggtgttacccattgtggtttct

SEQ ID NO: 14602 - DNA, 644 bp, Gossypium hirsutum
aagcgtgtaggtccttcacataacaaaaagtgggatgaaactcaaagtaaatattattatccttagtaaactttgagacagaaagcaaatttttatgtatttgaggcacatgaataacatcattaactgctaaagaattcaagatagaggaaccaatttgagagatagaaaaagacctaccatcaccaattacaactctacatgatcaatcatatggcaaggcctgcatcagtttggatgcaccattagtcatatgtgcagtagcactactgtcagggtaccatgcctgatcaaccactattcgaggagtagcaaccatggtggctagatttgcatcagaattaggacaactatactctgcatatgacactctaggaccagaaggtccacatgatgtagacaacataggttgaggagaataagcttacacaacacaacctgaacaggctcaacataaaaatattgagctactgcatgttaagaagaggcctgaaaatggcgtgatgatagggcttcaaagtctgcatcatcatcatatcgatagaagcatcgacgagcaacatgtcctacttgatcatagatttggcattgaggacgaaagtcacacccaaatcttcctcaagtatgacccttgcttaaaccag

SEQ ID NO: 14603 - DNA, 484 bp, Gossypium hirsutum
gcctccatgagcaagagtaatggggaagagacatttcaagttttcacagttcatgattgtaatcgaactcaaattagggaagcaaataggttggaaatgatgttgtgatggagtttgatccttctcaattatttgctccaattcctcacaggtagatatatacagcctccacaattgtggcaaatttcgagcgatggtaggtgagaagatgtatcttaaccttctgcaatcatcgactgtcaattgagtgagattttgaaagtgttcaacttggatgggaccactccatatcacccgcaattcagttagttcggacaacgttagcctctccagacttgaaagattatatctaggacattcaaataactcttcaaaattggaaattgatgttcctcctctcctttcagggactgtcacgttgcttatttgcttcttttctgtcatctccgagaaggataattccacccccaaaaggataattcca

SEQ ID NO: 14604 - DNA, 508 bp, Gossypium hirsutum
  misc_feature (484)..(485): n is a, c, g, or t
gtttctgttgattatgagtgttaatattcaaatatatcaacaatagaaagtcataatcatgaataaaatcctagcagattgaagcagtctaaaggcagccttagtcaacgataaaaaaatatgttaaaaaaataaggttgccaagtcacattaacacagattcaaaaaaaaataagtaaagcaaagaaaatattagaatttgaaataaacaaccaaaaaatggagcaaaaatgactggaaatactaacaaacaagaagcagaaaccctaattagcgaaaagagaaaaagttttaaggggagtagaaagaatttaaatgaaaaaaaaaggaagcaaggcaaacaaggaaacaaatagttttgaacttatacaaaggggaaagaattgagacaggagatcgggatttgaatcgaaaatttaacaagagattactgaaacgagcaagtgtttgagggaaaaagggaaaaaaaaggggacaaggactnnccgatcaaaggaaaaacaaaaaa

SEQ ID NO: 14605 - DNA, 406 bp, Gossypium hirsutum
cattcccaatcatgacgactttggtggccctcgtgcttgtgggactattaagtacattgacccaggagggttggtgggacttaactttagaaaatttggagtatttggcttcttaataatttactctatacttttattcatacgcttttatatattaaatatttataaaatttatgaaacttaagtccatattctttgatatatatgttttttttctatttttcttgtgcactatttttaaagtttaatactaaaacatattaaaaggcacatgctttgttattttggccagtacaaagctagtgcagaaatagcaaaatataaagtgggccaaaattcaaattatcaaatagtgtctgcttctgaatgttatgttatcacatgacaccattcttatgttggaagg

SEQ ID NO: 14606 - DNA, 400 bp, Gossypium hirsutum
actaattcaatacggtgggtacaatgaaatggctgatatattagtgaatttaacatcattagccactgaaatgggtcgattagtttccgagggttacgttttaactgtattagcacccaacgatgaagccatggctaagttaaccactgatcaattaagcgaacccggtgcaccggaacaaatcatttattatcacataatcccggagtaccaaaccgaagaaagtatgtacaatacggtgagaagattcgggaaagtatcgtacgatacattgaggttaccacacaaagtatcagctcaagaagctgatgggtctgttaaattcgggcacgccgatggatccgcttatctgttcgacccggacatttataccgacggaaggatctcggtgcagggatcg

SEQ ID NO: 14607 - DNA, 487 bp, Gossypium hirsutum
atgagatatttgaagtggcgtgagatacagtcaaaatgactttgaaatcccctgttctgtttttagaaaatccttgtaaattgtaccatgatgattataagataaaatttatatatttagactccttaatgagtctagtttcaaatgaaataaacgataacatatttcgaattctgcataatgagaaaattgattcgtagtgaagagtggtcagaatagtcaaacagtgaaacaggggaaacttcaataaaaatctggtattgattggtcaaaccaaaaattctgaaaattttatggatggaagatatatgagtctatttttagggaaaattaacggcacttgaattggagttccttagctctagttataaataatttagtgactgttgctcaggaagacagcttgtagtgaatttgtgattttgttgcaaacatggttaaaactagttaatgagatgcttttcgagttcctgtgatcatatttgtg

SEQ ID NO: 14608 - DNA, 464 bp, Gossypium hirsutum
aaaaacacccatgcaagcgaaaacagaaagagagttttcgtgggaggaagagacccaaagttattctctgtcgtttctgtttttattgatattgaaatcccctacctcatcgaagactgatattcaggtatgaattttaagttcaaaattttctttttccttgtcatttctattttagcttcaaatctatgctttttttactcgtttttcagtaggatatttttttagtattttagttttttgctttacaattcactgcttcattttgtgtttcaagtctattttactcggtttcgtcgttctttttgtttgtttatcttttagtatatgttctttatttttgaattttgtgtttccctgtattcactattttagctattgtcttacaatctatttcttttacttgtctattttgtgtttattctggagttcttttaatggggattgtttatttactgcaagcg

SEQ ID NO: 14609 - DNA, 662 bp, Gossypium hirsutum
  misc_feature (60)..(62): n is a, c, g, or t
  misc_feature (647)..(659): n is a, c, g, or t
gaatttaccattgttattgctactcctatttaaaacttttttttcccttttaaatttaannnttatctcgaaatgctgatatgtaaaccaactactttggtggcaactattaatcctagtatgatgatatgtcattcaaccatccatgcaaatagagatgtagcactgtaaattagtataaagaagctgagcaaggaactccaacaaataagcatggaagaaattcaatatcaacagacgctactatcgctgtcaatactctccgaaagagaaagaaactgcacttaccaatagtctgcaactccaggaaacgcataagcaagatagatatgaatggcatggctgcaaaaattatatatactgaatatgtaggaaacctttgaaatgaggggaaaaagcaaggggtacatgaaatactctttaaatacctctcaaacaacttaaatcttccatcagcaatggcaggcagcttttgcatgagatttattgctgcaacaaaatcattggaataaaaactgaacatgtccagtttcctataaataatttcgtaacactaattaattgattaatttgaaaggtgaaataattaagaatgaaagaataccttcgtcgaacaaaaaaaaaaaaaaacccttcaaattcggggnnnnnnnnnnnnnttt

SEQ ID NO: 14610 - DNA, 412 bp, Gossypium hirsutum
  misc_feature (54)..(55): n is a, c, g, or t
  misc_feature (337)..(338): n is a, c, g, or t
  misc_feature (341)..(341): n is a, c, g, or t
  misc_feature (386)..(386): n is a, c, g, or t
atgcagggcgacttgcttgagctttagttttccgaaaatccatctccacctccnngttttctgaaaagtaaaaccgaaattattacaagcaaaaaggaaaaaagaaccaaaaagatgaatcaaaaagctattaattattcaaaaaaaaaaaaaaaaaaaaaaagcaaaagttgaaaagtaacaggaacggaacctgaccgttttgggttttgggttgggaataaaaaacatttttctttttccccaaccaaacccttttcttttcctttcccatggacaaatttcattgaccaattcaaataaaaaaaaattttaattttaaaaaaatttgaaattnnaanaaaaggggaaaagtttttttttatgaaggccccccccccccccanccccccccaatggtgggggggggagg

SEQ ID NO: 14611 - DNA, 611 bp, Gossypium hirsutum
cattatatcgaccaattctcaacctatttgatctgatcttgttccaataacactgatcacatcattaaatcttaataaaattcaaattcaaaaactaaaatggatctaattattaagttcaattataaaaataaagaaaaaaattattcctaccttttataacatgaataattcacatgctttaagccaagttaatataatgtgactcttatttaaaaatgtaaaattatcatgcttatatggatttacgtgaattaattttctttagaaaatatctcgaaacacctcaaattagagtgaaaatctcattaacctttcgtgttaattgctttagctattttggtcaaattattcacgtcacaaagtaggactaaaggcactttgtataggtgatacatttacttactgttaatgtaaaaataataataactttgagattaaatgttgtaataatattatagtgtaagaccaaaattttttttttaaacaaatcgtattgaaaatacgttcattaaaagggtcctaacttgcataaaattaaagcgaaaagtagaggatcaaaattaatggaccctaccccaaaatcaggtcaaatttacgaacgttaacgg

SEQ ID NO: 14612 - DNA, 587 bp, Gossypium hirsutum
  misc_feature (60)..(60): n is a, c, g, or t
  misc_feature (565)..(568): n is a, c, g, or t
  misc_feature (570)..(570): n is a, c, g, or t
  misc_feature (575)..(579): n is a, c, g, or t
cacaagtccatatcatagtgacacacagagtgcttatagtactgcaacacaacagagcanaccaaaagagaattagatgagcaataagattcaagtaaatgctttccatggtaaaagaatatgttaaaaggacaaacaccaacatcgaacgtgatataatgagaagaaaaaacagatttacacattaacaaggcaaccttatgggaaacttaacatttcagtgtgttatataaactcggatatcaacatccgacatttatcatcatatattcatatttcgacacaacttcatcctagccaccccaatcaaccaatacactttactgaactccctcgatttaaaaaatttatgaagattgattaagaatgaaccattcacgatacatatattaaacgagtgaaatcgagagggaacatgggaatacatatacaaatcaacccaaacaccactctttcctcctcctccatctgcctcatatcataattttatactaatgaagtggcgaacatggataaaacaaccattatcaaataatagaccatgagacaaaggggtctcaaatannnnangaaannnnngcaaatat

SEQ ID NO: 14613 - DNA, 776 bp, Gossypium hirsutum
  misc_feature (554)..(563): n is a, c, g, or t
  misc_feature (565)..(565): n is a, c, g, or t
  misc_feature (569)..(573): n is a, c, g, or t
  misc_feature (581)..(589): n is a, c, g, or t
  misc_feature (591)..(599): n is a, c, g, or t
  misc_feature (601)..(603): n is a, c, g, or t
  misc_feature (608)..(611): n is a, c, g, or t
  misc_feature (618)..(626): n is a, c, g, or t
  misc_feature (628)..(629): n is a, c, g, or t
  misc_feature (639)..(655): n is a, c, g, or t
  misc_feature (659)..(672): n is a, c, g, or t
  misc_feature (674)..(684): n is a, c, g, or t
  misc_feature (687)..(691): n is a, c, g, or t
  misc_feature (693)..(713): n is a, c, g, or t
  misc_feature (717)..(722): n is a, c, g, or t
  misc_feature (724)..(733): n is a, c, g, or t
  misc_feature (735)..(740): n is a, c, g, or t
  misc_feature (742)..(744): n is a, c, g, or t
  misc_feature (747)..(758): n is a, c, g, or t
  misc_feature (763)..(771): n is a, c, g, or t
tccggttaccatgaaaggtagttctgaacagcaactcttgctgaataatctctcgggtaccatgcaacgaatctgtcggagtttgagaacagtttcagatgtagaaattagtggggaaggttcaaatgttgagtttcagagtggaacagtcccaaatttccccctgacgtctatgtctaggagctcggaaacagtattgtctgctgatagtgaaaggaactcacatgatagagttccattgaatgcatctaatgcaacaagtgatgggaaggaaaaggatggccctcctgaacaggtattgtgtcaaacattctttcgttttgatgtatgattttagtgctcgacttacgaaacacatgaatggttcttttgttgatttgtatataaagaagtctgtatgtttgatttgagcgttgcaccgacacagaggaatttcatgatctatgaccccttttttctgatatatattgatttatataaaatatcttatactgaagcatgatgaatgtagacgccagattcttctgtcatccactcgtaatattcaagcaatnnnnnnnnnntntatnnnnnaaaaaagnnnnnnnnntnnnnnnnnntnnnttctnnnnaaaaagnnnnnnnnntnnttagtgaaannnnnnnnnnnnnnnnnaccnnnnnnnnnnnnnnannnnnnnnnnnttnnnnnannnnnnnnnnnnnnnnnnnnnatannnnnncnnnnnnnnnntnnnnnncnnntcnnnnnnnnnnnnactannnnnnnnntattt

SEQ ID NO: 14614 - DNA, 362 bp, Gossypium hirsutum
caaatgggtaatggcttatcaatcaaagaaacagtgaccttttttttgtttgtttcttttcttattggtattcacatagaagaaattattttctttaagaaatatttgttgtccaaaagcataatctttgagatctcaaatacataaactaagcataatctaagtaaacgaagcataatctaagtaattatattatttatacatgtccaaaagctatacttgtttatatctttgagatctaaatacataaactttttcagttttctacaggaagcatggggggggggataaatggccaaatccattgacaaaaaaaggctatgatggaaagaatgattgagagataagagagagagagaggg

SEQ ID NO: 14615 - DNA, 656 bp, Gossypium hirsutum
tcctattgttagcaaagaatcaaaactaagcattaatccgcagcacgaataaaactgagtgtataaatcatttttaaaaaaatcaataaatatgccttaaattataagaatatatataatctgaccttttgtttctctgcatcaatataactctgaacaccaggaaccaaccttttttttgtaaaaaaggtgtttttttgcaaaatggagaacaaattgattagtcaatgaaaatgaatatttccgctctgaaacttaaataaaataaaacatataaattttaatagattacttgatggaacgcatgaataaggctaagaccgtagctttgaggcctttctcgtgaataacggaaaggagcgagtgaagtagacgggcaataaatagagtgagcagaggggcgagaagcagagccaaaggttcgaattgtgaaaggaagagattggcagaaagtctgaagcgaactaagaatgaattcaaccaagaagaagaataatccatctttgtttcctcctgaaaaatttaggaagaagagaggaaatgtgaaagggtttataatgttggggttggtaatcgcgtgcaaggcacgtcccttgtgttttggcgggggtggaatgcgtgacgttgcctcacttttcctttcgactttcctggtt

SEQ ID NO: 14616 - DNA, 485 bp, Gossypium hirsutum
caaggccttatctttagcagcattactcacaggtctctggattttattctgatagtaaagggaagaacagattagaatatcaacttaagcatggtcaactataaaaatctgttttctagattaagaaaattcttaccggtatccttggctgcttcttagatttatttgaagtattttttgacattttaatgatatcatctaagtccatagaaaacgcaaactgatcagaaacatgttcaaccccgaagacaataaattcgaaaaggcataaacagctaaaagctcacccaatgtcatgtccattttcttttctgtgagggcgattgcttcactcgtaagaggtttagccgccatctggaaaagaaaacagaattaacccacagcaatttatggcgatatttagaaataaaagcaaaataaagtcaacatttatttttaaaaaaaagagctcaacctcaagggacgaaacacacaaacaagataaa

SEQ ID NO: 14617 - DNA, 418 bp, Gossypium hirsutum
ctctctcttctttccgtctgatttctgtaaatttttatactattttattttctttgccaatattaagactccctttgctttgtgtatcagcggtgacaccttccaagaaatttaaaataaataataattatggctaggagatttttttggtaaactatacaaattgtgctaaaagatttcaatttaggtattaaggtttatatttcttgctgttttggtcattgcagttaaattattttttttctaactagtatgattccacatttagttttcaatgcttatatattctatcaatttgatcctaattttaaataattcaataaatttaattatttacattacaaattctatcaattgatcctcaaacttactaaccaaaactttcaacttttaaaacagagacattcggcatcaatta

SEQ ID NO: 14618 - DNA, 666 bp, Gossypium hirsutum
aggttctactctattcggagcagattaatttgaaatttattcgctttcaacagtattggtttaactagattacatctgatgatatttccttttctctactatgtttagcaataataaatgacctacttgttttagtattatatggcgagatttattggttgaatcttatggacattttgtatttctaactctgtttagattatatcttaaaaaccagtaacttaaatttgtataaattaaagatgaggtacatgtgattttggctttaaatgacagttatttgattgatggtcaccaatacatgtgtttatgttgattttgacatgagctcattcctttcctcactcctaacgaatgttgttgaggtaattgagtcaagtcttgtaatattaatccttaatctttcagattatttgatacacgagagttcttaatttgaattaagaaatgatcatgtttttatttagggtacatgatatgtcttgaacttggtaattgttttcatattaggatttgaacttctttttggtccaaattaggccccaaatttagcaaatgttcccatattgggacttcaactttgtttttatccaaattaatccttgaaaatcctaaattcaaacattaatttgaaaacaattgtcaagttcaagctctaaatgtggg

SEQ ID NO: 14619 - DNA, 530 bp, Gossypium hirsutum
aaagagaacctgagagaagggtgatgaagatttgtattaagagagattgccattgttttggggggccttgaagactacgacagagttttattcggaaaattaatagactgagagaaggttccatgatttatcgaggatctgacctgatgaatgcgctactgtcgtagatatattcatgaagaaatctctgccgcttgattagttttagatataataaagggcatattagatttcattttgttcgcttttctcaataattgtgagaaactagtgcttataatgaaattatttattattaaaatttaatttattatttaatttaacatacagtaattaatttattattttttaatataaaggtaaaatataatgtttttaatataaaaattttcatgagaattacccaataataatttttttaattaatctttagaagatattagatgattaagtatagaattttcagctaaccaagttttaacattgttgattaaggcttagattttttggtaccggttctattgagtcta

SEQ ID NO: 14620 - DNA, 387 bp, Gossypium hirsutum
tcttgattgtgtgctatcacattttctatagtgctgcattagtccttttcccagtctctgttcgtatgataaacaggaaacctctgctaacatggatgatgtatgagcttctgtagagaggcgaagctaaaccattaggtctgcctttctaagctactgtcttcctggtcaatgacttttagacctaaagtacttctgggagagccttttctaattgtatcactagctttatacatggacttatttcttataagaagcattaactgatataaaatattgtcatattctgatctaggtttcaacgctttatctttattgtatctttttaagaggcctgcgatgtggtcctttttcctatttgcatcggtgcatttgactcttgttaaa

SEQ ID NO: 14621 - DNA, 551 bp, Gossypium hirsutum
  misc_feature (422)..(425): n is a, c, g, or t
  misc_feature (481)..(481): n is a, c, g, or t
ttaagttggtgtgccgtttggggttttccttttgtttttggaaactatttaggtttctttaggtctgcgttttagcttcctgtgtgttctttttcttgttttcttttggttaatttacataaataatataaaaaaattaaattaaatactgaaataggttgtctaggttatatacgaaaattgtatgttttttcgggtcacatctatttaacaaatgcaaccacttttttatattaaaatatttttttactttaaataaaatattatcattttatttttattaaaaatacatacaggttaaaatatagtctacaggtcaaaatacgagttgaaaatacccaagaccagtcacgcctgtcagataggcaccactggtcacgcctgacaggtaggcgccactgcctctcccttgcgcacctctnnnntcacttgctcttcttctcacttcatttatccataaattctaaactatggcaaaatngaaaggataatttcctgctcttttctttccctaattccattccattgtaaggaacattctggaaataaac

SEQ ID NO: 14622 - DNA, 415 bp, Gossypium hirsutum
tttgaccggatcagagcttgggcatatacttaatgatcctagcattctgcgacagactttggaagctgctaggaatcctgaactcatgcgtgaaatgatgcgaaacactgacagggctatgagtaatattgaatcctctcctgagggatttaacatgctcaggcgtatgtatgaaaatgttcaggagccatttttgaatgctacaactatggctggaaataatggaaattctccaggttcaaacccattcgcagctcttttgggcaatcaaggcggttctcaaggtagggattcacctagtaacatttctgtaactggttctgaaagcattcaaggacaaacttccccaaacacaaatcctcttcctaacccttggaacaacactgttagaggtgggaatttcattaatacattt

SEQ ID NO: 14623 - DNA, 432 bp, Gossypium hirsutum
gctttttggatcaagctgcaagtaaaacttactgtaacattgctatttatacaataagatatgcaaagtgcgttaagaaaatggtaaaacttactgtaacatacagtctttctaacttaggacacaacttcaggaagcaaagtaaggcattgattgattctctttccgttgagcaatcaatccaccaaagctcttttaattggctcaaataacattcagggtgtctacttgagaagggtaacttcttgcatatcgatgtctaaacaaatcacaacaatatcaccaatcaaagattgagttatgaaggttagcaaggatgttggttgacttttcaatttgcttaaaggactatatttttaaatatgaatatacacaaggacatgatattttaaggatccttcaaaacacgcacacacacacacacaaaaaaaa

SEQ ID NO: 14624 - DNA, 315 bp, Gossypium hirsutum
tctttctatgatttggaagattctagaaaatcatatccccatacccttgcgttggacactagtattggacagggaacttcaagaaaaatgaaaagtttaagtaatacagctagtagctatgttactcgtacttcggtgtgattgtcgtgcctgacaaaggtaaggtaaccttttttcaaagttcttccatgaatttagacaatctttggagaccatatctccatttccatgtttgggagggtacttttaacaaaaataagaagtcagagcaaagttctagtacacaatttattatccataaacatagcttctgaa

SEQ ID NO: 14625 - DNA, 484 bp, Gossypium hirsutum
  misc_feature (291)..(291): n is a, c, g, or t
  misc_feature (317)..(317): n is a, c, g, or t
  misc_feature (428)..(428): n is a, c, g, or t
  misc_feature (432)..(432): n is a, c, g, or t
acttggataatttcaaagctagaccctctcaaatacatgatggagtcaaccgctttaaatggaaggatggtccgatggcagattctgctctccgaatttgacatagtctatgtaaaccaaaaagctgtgaaggggagtgcaatagcagatttcctagccagtagagctttggaggactatgaacctttgaatttcaatttccccaatgaagatctaatgtatgtagcaatcgctgaaggagacatgcctgaagatcattcttggaaattaaattttgacggagcatcaaangccgttggaaatggagttggggcagnactgatatccccaaatggagatcattatccattcacttgcaagctggattttgactgcacaaataacatggcagaatacgaggtatgtatcatgggaattcgggcagctanagancgcgaaatcaaagtattagaagtgtatggagattctgcattggtaatttatc

SEQ ID NO: 14626 - DNA, 702 bp, Gossypium hirsutum
ataagtagctatcaagatcaaagcctttttcgcacagcacaggagggaagtacgaccagagcccagggaaagacttaagccaagactgattcctccaagaaaagctgttaaagcatcaacttcttcctccttgttcatatgatagacacgtgcccgaaggggaactactaggctttgttaggacatttaacatatatctttccaggacaggacttaagtaccagttccagcagcaacaactagtaaggcctataaaggcaaatttttggacataattcttctcttttgtgaggattgaagtgaagggcgccccatggtcggatgcgagccaagctagttaatcaaaagcgagtctccattacgcggtgatctttccgcaagtggaggtccaggctctaatccagtctctgatggcgtagtgggctaactgactgacctaaaggactaggcagcttcggctcctataacacaagacccgcattcaatcagagaggctttaactccctcgtgagaggtgattgcaccagtagcaaaagagatctcaggataaataggtaccatatcatatgtataacgagaacggacatgacacagcaagttgctagtataactagctcacacaggggtctgaaagcttttcagtcaaggctggtcggggatctggagaggaagaggaagtccctttactctattccttggcag

SEQ ID NO: 14627 - DNA, 648 bp, Gossypium hirsutum
  misc_feature (448)..(448): n is a, c, g, or t
  misc_feature (509)..(509): n is a, c, g, or t
  misc_feature (524)..(524): n is a, c, g, or t
  misc_feature (581)..(581): n is a, c, g, or t
  misc_feature (596)..(597): n is a, c, g, or t
  misc_feature (604)..(604): n is a, c, g, or t
  misc_feature (627)..(631): n is a, c, g, or t
gcagttataatgagctggttgagtataagattgttttgaggaaggtatgggtttttcttcgccgccctaattaagctggctatgcttgtctttctagttcctatggatatttttgcatcatgagaaacagtaacacaaaaatatttccacttaaattgctaattcttccaatgaaaggttatgtatgtatatttggaagagtaaaatatccaaagttgaacactgagctgtgaactggataggagttgatagacattgttcaatcagataaagacttaagttagtattaatatcatattatattcttgttttttataaaatatattcttagtggatttcaattcagatattaacttgctctttgtttgtacatcttcttcttcttcttcttcttctttttaaattctgtcactctatctactgttaggtggttatctctttcatttcnttcccgctcaaaatgctttataataattgcataaaatgatactttattttcctgtttaggntggtgacttttttcnttcagcacaacacagtgctacagctcggcaaagggaaatggaattaaatcaaatggntgaagaatccatagnnactccantgttacaggagcaagtatggcannnnntttcttttagtgtactg

SEQ ID NO: 14628 - DNA, 608 bp, Gossypium hirsutum
atagctactccacaagcagaaccggtgacactcttgcaatttttaattgagtttagtaccatttctttcctatagcacattggactcttttctttctctatcaaaatttaactcaaaaatttgcttaaaatgtattgaattatccatttttgatgtagtgccaagaagcattgcattcttgagagaatgtaaattcaaacattaaaaacaacattgttagaaaaggtaaccacaaagtttggacataaactataaaatgaaaatgaagaaccttgaaaacaatttcccaagttcaatccatatttatatttatatttttttacaactcacgtatcaccaataagaataagctactattagaaatcttatcacacgcgtccgtgaatttagaatacagatgtgtgtttaaaaatgacatagaataaataatgaaatgtatggtttgaaataaattaattataataacacatgaaatatgtacgatattaaaataaaataagattaatttatgagtaaaatagtatttaaacatataaatatatttgattaataatactaaatgcagtacaattgtttatcatagttttgtcatcaaccgatggttagtg

SEQ ID NO: 14629 - DNA, 660 bp, Gossypium hirsutum
tgatggtggtggtaaggatcttcatatgtttgtttggagttcaagtgcttctccggtatcagatgtgttcggcggtggccatgaatatggtgttaccgaccagaaagaagttcggttagctgtctcccctggcaaaggtacaagcttttgacctggttttttaatacctacacatgaatggtaaaattagatggagattaggttgaagagtaaattaaaaattttagataatttttattagtaaaataaataaaaaattttaacagagaatattaattgtgtaaaattaatttacttattttttaaatacgtgaaacaaaatataatttaattcataatttaaagaatatttttacggcatttaactagttttttaaacatatatatatatgattgtttgttttgttgacagtggaaggacatagagataatcaagaggagtttatggaaagagatgagttcagttttgggaacagaagagaaatgaacaatgtccaagaaagtggtgaaaacaacaaagttggggaagccattgccattgctaaccctaaaaccatgccaccaacgagtgtaatgacaaggctgatattgattatggtttggagaaaacttattagaaaccccaatacttattcaagcttaattggtctcacttggtca

SEQ ID NO: 14630 - DNA, 609 bp, Gossypium hirsutum
tctgtctgtttaggcatttctctcatattggaacctcaagatcaccttagcaacatgggtgtctcctcttagtctcctccctccttcattcatcaatgccataaacaaaaacaaattggtatcagagaaaagaaagaaagcattcaatcatgtaggttttagaataatggttctaaagaagaaaattaaggaggtttctacattggatactaccacaaaccatatagtctacaagcaaaggcttgaaggagataaataatcaacacagataccaacaatttccatcctattccaagatataagatctcctccatgtaacgataacttcaattcagtcaagttaaagcacacacgaaacaactaaaattcttaaagtttaatcaaaatgaagaaagcaaatactaatggtaagattcagatcaagcaagtattcccatttcgggtaagcaaatgcaaatgcaaatatgcaatgaaaaaacattgatatttgaagtaatctatttgaagaacacttagatggcattggatcaagcaatcaaaagtcataacgatagacgcaaaacagctaacaaatcccataaatcgacttaccataagcatctgttagtt

SEQ ID NO: 14631 - DNA, 260 bp, Gossypium hirsutum
attttttatcttcgttttattatccatgtctagagcttacagatcttatatctataatattcgagtcctcatttttttataatataaattatcttaccattacatccaatataattttacaattaaagtttaaggcttggacttaatatacttatggtgttccccatggatatataaacaaacaaaacttttatggtgggacaaggagtattcagcaaaccaaatatattctagtggcaaacaagaaaggaggatagagg

SEQ ID NO: 14632 - DNA, 650 bp, Gossypium hirsutum
atttggtagattctcaaataagaaatcaggatattagattgtgtgactcgaatatgtcgtttgttaaaaaaataaaataaagaggtaaaataagactttacttcttctatttgactttgattataacaggattgtttaatccttaaatagatataatcgtatttctcttgtattgtgtatttttcaacatagtgaatttttcctattttgcctgtgatttttttcaataagggtttttcacaaaaaaaaattatattcttatttttttattgctttgcaattattctattgccatcatcgacatttattataacacatgatcatgtgttcatctcaaagtccaagtcccctacaaggaggtctgaagccgagtgtagtatagatacatcatgtagtaaatttcatgagcagttgagtggaatcgtttatcttaaatgaatcttaattataagcatgtgagagggaaaagtattgtggaggctcttatactagaagatagattgcattttattctttctactccaaaaacggacaaattagtatttatgtattagattaaagagtaaattaattattctgttaaaaaatccatccattttcactagtaaaaaccagtctttgtatgtcaacatgaggtacacgtggcacat

SEQ ID NO: 14633 - DNA, 606 bp, Gossypium hirsutum
aactttgccatccattgtatggccacctaaaataacaaatatttgttatccagtttagtcgcaataacattctttaagtaggaaccacgattacaactctttaggtaggtgttgacgggtttcactttattattgggagaaatatttgaagtgtaatcttttaaacagtcaatttagattttgaacagtaaaaatattatatttgagatatttatacttgattttaattttaaaattttgtctattgattttggaaagaacacaaaaaaaattcatggaatttattggggagcacttaaggtcctcaaaaaaaatattttatcattttgactttggtaagtttcgaacccatgcctttaaaaggtaaaacgctgtcaaaatgataaaatattgccttaatggatcttaagggctcttgataaacttcacgaaccccttcgaattttctttaaagttggaagacaaaatcctaagtttaaaatcgagtataaacaccttgaaagcaatattcaattggttgaggtctggattgacttcttaaagaaccatacttgaaaactttcttccaataagggagttgattccctctgaacagtaggttacctg

SEQ ID NO: 14634 - DNA, 686 bp, Gossypium hirsutum
cgcaagattgtccataccaatgatcttaggtcagctttttaagcttttaaatcatcattcattacattgtgaacttgcaactaacattattcagattgcatttttactctttcaactaagaaaataggttaattagtccttatacgttatattaaaaagtaaacttgtcatttctattaaaaatttcatttatttatactgttgaaactggtgtgtctaatggaataatcagatagtgccacgtgtacctcatgctaatatacaatgaccagtttttaatagtagaaacggatggaatttttaactcaatgatcaatttgctctttgatataacttagaaagactaatttgatcattttttagtagggagggtaaaatgcaatctgactcctaatacaagagccactatgatactttttgaagtttagtgatcgatttaaattctagacaatagtttgagtacatttcatgaattaactcgaaaataattgatattctaattggggtaatattatttttgatctctcaacttgacaactaggttcactttagtacatgtaccttttttttgttcacttttgcacttgaatttggcaactaattctattttggtccttgaacttgaaaactaaaaatttaataacataacactttgatattataccacatcatcagagtgtcacatt

SEQ ID NO: 14635 - DNA, 455 bp, Gossypium hirsutum
tagtctgccatatatgtatatatcataaggagtcattatcctctatttaagatcacaccatcagctcactaatttaaaagaaaggtaataagttatacttccatccgttcctctcctatttacatgaatatccattagatcacactttaccaccagagtatatcctatttcatgtccaaactagtgtaagtttattgccatgtatgttatcttctacattattcatcatgccgtatttcctcatacacccacacctccaatcctaacattctcatctcctcatgaaatgttgctacttatttgctgagcatttaaactgcacaacattactgatctagctagcatcctaaaaatgatccatcaagctccagtggaacttatgatcacacaaattgcaaatccactccatttcatctaccgctctgaaatcctatgtttaactcttgcaccagtca

SEQ ID NO: 14636 - DNA, 647 bp, Gossypium hirsutum
gaacactggtatctgcgtgaaatactgaggttgatgctgtgtcttattcttatgttagtagctgtacatgtataatccttgtgtaaaaatacaacttaagagtatgttgccccaactctttattttccttgaattttctgtttgcaacacctcctatggacatggtatggggtcctgttgtctaaagtctaaatgtacagaaaaaacttcaaaagaaaattgaatctgttacactcaccccagttagagtaacatagcttgtagaacccttgcatttggtttgcatcaacatacagcaatctatttgtttggtggctaagaccttgtaattttagggtgtaattggatgagagagtatattttagtgttccggttggtttagaaagaacaagattcaatttgggctaaatgaaaaaaatttgaaataaacatccttaccaatttgggttatgagcagtaatctcattggtggtttcacttgagacttgaaggttgctttggtgtgggttcagcaagggtttgaattgataggtgtcaattttctggttttaatagagctagttaggttggttgtgatgtgaaccgatgccataaaagaaaggagacaaaagatcttgcattctcaccaaagctggaatgcttcaccc

SEQ ID NO: 14637 - DNA, 658 bp, Gossypium hirsutum
taaagttcaccatttcggattctgttcatttgagatgatatccatctgaattggccgttcaagttgtacttctcgatcagctcaaacattttcttcatttcggccttctcttccaaatctttagattcctttcgcctatcaccacctacaactacgaggttagccaactcacgcaactttgcgttcttgccgtaccactcgacgagtccggttaagttcttgacacgatcaagccttgccattgtgaacagaattggcttgttgcggtcattgagcacacatctgtaggaaaatcagggacaaatcattagttcagacgggatatgttcccacaatcggattttgctaaaacatataaaaaagcttgcacttacaagtgttcttcattctcaactttgctgtaaagaaggtcttcgatctcagtatggaaatgcttcaacctccgcttctcttcggtgtaagggaagtatatctccatatcagcaccaggggaaacaatgttgaatttgggatcaaacacatcgataccatgtacaacacggtagagaccaggaagagtgaaagcagtgtggctctcgtattgaccaacagtgtccttgctgaaaaccatttgagaattttattaatgttaatgatcttcattatccgcccgagaatt

SEQ ID NO: 14638 - DNA, 1257 bp, Gossypium hirsutum
  misc_feature (693)..(697): n is a, c, g, or t
  misc_feature (699)..(708): n is a, c, g, or t
  misc_feature (710)..(713): n is a, c, g, or t
  misc_feature (715)..(722): n is a, c, g, or t
  misc_feature (725)..(729): n is a, c, g, or t
  misc_feature (731)..(736): n is a, c, g, or t
  misc_feature (741)..(769): n is a, c, g, or t
  misc_feature (775)..(805): n is a, c, g, or t
  misc_feature (811)..(813): n is a, c, g, or t
  misc_feature (815)..(820): n is a, c, g, or t
  misc_feature (831)..(831): n is a, c, g, or t
  misc_feature (833)..(835): n is a, c, g, or t
  misc_feature (838)..(841): n is a, c, g, or t
  misc_feature (843)..(849): n is a, c, g, or t
  misc_feature (852)..(861): n is a, c, g, or t
  misc_feature (864)..(867): n is a, c, g, or t
  misc_feature (869)..(876): n is a, c, g, or t
  misc_feature (880)..(889): n is a, c, g, or t
  misc_feature (891)..(893): n is a, c, g, or t
  misc_feature (895)..(903): n is a, c, g, or t
  misc_feature (905)..(905): n is a, c, g, or t
  misc_feature (915)..(927): n is a, c, g, or t
  misc_feature (930)..(938): n is a, c, g, or t
  misc_feature (941)..(942): n is a, c, g, or t
  misc_feature (949)..(953): n is a, c, g, or t
  misc_feature (956)..(976): n is a, c, g, or t
  misc_feature (981)..(987): n is a, c, g, or t
  misc_feature (995)..(1008): n is a, c, g, or t
  misc_feature (1011)..(1013): n is a, c, g, or t
  misc_feature (1017)..(1017): n is a, c, g, or t
  misc_feature (1019)..(1023): n is a, c, g, or t
  misc_feature (1025)..(1025): n is a, c, g, or t
  misc_feature (1032)..(1040): n is a, c, g, or t
  misc_feature (1043)..(1045): n is a, c, g, or t
  misc_feature (1049)..(1056): n is a, c, g, or t
  misc_feature (1060)..(1070): n is a, c, g, or t
  misc_feature (1076)..(1079): n is a, c, g, or t
  misc_feature (1083)..(1088): n is a, c, g, or t
  misc_feature (1090)..(1097): n is a, c, g, or t
  misc_feature (1099)..(1104): n is a, c, g, or t
  misc_feature (1110)..(1115): n is a, c, g, or t
  misc_feature (1128)..(1128): n is a, c, g, or t
  misc_feature (1131)..(1144): n is a, c, g, or t
  misc_feature (1146)..(1149): n is a, c, g, or t
  misc_feature (1152)..(1156): n is a, c, g, or t
  misc_feature (1158)..(1174): n is a, c, g, or t
  misc_feature (1176)..(1202): n is a, c, g, or t
  misc_feature (1205)..(1217): n is a, c, g, or t
  misc_feature (1219)..(1222): n is a, c, g, or t
  misc_feature (1229)..(1232): n is a, c, g, or t
  misc_feature (1234)..(1240): n is a, c, g, or t
  misc_feature (1242)..(1242): n is a, c, g, or t
  misc_feature (1244)..(1253): n is a, c, g, or t
ctgcacagaaatcatcgcaaaattttaagcacttcactgattaataaaaaaaaaggaaaaactttagtccaaccatcttaacaatttgttctcaatgttactgttgttagtgtttttcatcagtttagccatcaagatacataggaaagttattactcatcatagtaaataatttgatattttcaaatttcaacttcacgcactcaaagcaaaatatttcaggattaactcacatagaatggtatgtatgtctgcctgccattgacaaggccgcttgtgaagccggtgtaccctgccattgctccatgaacaacactttgagcaagaagtgtgcagtaaacattatcagatgcattgcttggaatagcccgaatcatgtatgtaggatctgccagaagacaaagtactattctcaaaaacttctgtcattaactagaagctcataaccacctttggctaatagttattctactgacctatatacttgaggtttatgggcatctttctttgttttgaaaagtagtcctgaaaatgacaggtaaaaatgaaacattgtacatcatggcacatgtcattgaaatgttccaagttgaatccatatggcataccttgatcctctgcgatatccatagccccacatcctggagaagcttgtttcctgaagcatctttcagatccggaacctttttcagnnnnnannnnnnnnnncnnnntnnnnnnnnaannnnnannnnnnaaaannnnnnnnnnnnnnnnnnnnnnnnnnnnnccaccnnnnnnnnnnnnnnnnnnnnnnnnnnnnnnngttgtnnntnnnnnnaaaactaccanannngcnnnnannnnnnnaannnnnnnnnntannnngnnnnnnnnaaannnnnnnnnnannncnnnnnnnnngnataaaacccnnnnnnnnnnnnncannnnnnnnnttnncccccannnnnaannnnnnnnnnnnnnnnnnnnnatacnnnnnnnccaaaaannnnnnnnnnnnnnttnnncacnannnnncnactaaannnnnnnnntgnnntttnnnnnnnnattnnnnnnnnnnntaagcnnnncaannnnnntnnnnnnnngnnnnnnttttcnnnnnnaattgtttagatntcnnnnnnnnnnnnnncnnnnctnnnnncnnnnnnnnnnnnnnnnntnnnnnnnnnnnnnnnnnnnnnnnnnnntannnnnnnnnnnnncnnnntgttcannnngnnnnnnnancnnnnnnnnnnacca

SEQ ID NO: 14639 - DNA, 1491 bp, Gossypium hirsutum
  misc_feature (656)..(669): n is a, c, g, or t
  misc_feature (673)..(678): n is a, c, g, or t
  misc_feature (680)..(702): n is a, c, g, or t
  misc_feature (704)..(711): n is a, c, g, or t
  misc_feature (713)..(720): n is a, c, g, or t
  misc_feature (725)..(726): n is a, c, g, or t
  misc_feature (731)..(737): n is a, c, g, or t
  misc_feature (739)..(767): n is a, c, g, or t
  misc_feature (770)..(774): n is a, c, g, or t
  misc_feature (776)..(776): n is a, c, g, or t
  misc_feature (778)..(779): n is a, c, g, or t
  misc_feature (783)..(783): n is a, c, g, or t
  misc_feature (785)..(789): n is a, c, g, or t
  misc_feature (795)..(795): n is a, c, g, or t
  misc_feature (800)..(800): n is a, c, g, or t
  misc_feature (807)..(813): n is a, c, g, or t
  misc_feature (816)..(820): n is a, c, g, or t
  misc_feature (822)..(827): n is a, c, g, or t
  misc_feature (829)..(833): n is a, c, g, or t
  misc_feature (836)..(844): n is a, c, g, or t
  misc_feature (847)..(856): n is a, c, g, or t
  misc_feature (858)..(878): n is a, c, g, or t
  misc_feature (880)..(900): n is a, c, g, or t
  misc_feature (902)..(915): n is a, c, g, or t
  misc_feature (920)..(923): n is a, c, g, or t
  misc_feature (926)..(933): n is a, c, g, or t
  misc_feature (935)..(938): n is a, c, g, or t
  misc_feature (941)..(954): n is a, c, g, or t
  misc_feature (959)..(961): n is a, c, g, or t
  misc_feature (963)..(971): n is a, c, g, or t
  misc_feature (974)..(985): n is a, c, g, or t
  misc_feature (987)..(989): n is a, c, g, or t
  misc_feature (991)..(1000): n is a, c, g, or t
  misc_feature (1009)..(1020): n is a, c, g, or t
  misc_feature (1027)..(1037): n is a, c, g, or t
  misc_feature (1042)..(1045): n is a, c, g, or t
  misc_feature (1048)..(1050): n is a, c, g, or t
  misc_feature (1052)..(1055): n is a, c, g, or t
  misc_feature (1057)..(1058): n is a, c, g, or t
  misc_feature (1065)..(1087): n is a, c, g, or t
  misc_feature (1090)..(1095): n is a, c, g, or t
  misc_feature (1099)..(1103): n is a, c, g, or t
  misc_feature (1105)..(1112): n is a, c, g, or t
  misc_feature (1115)..(1117): n is a, c, g, or t
  misc_feature (1119)..(1129): n is a, c, g, or t
  misc_feature (1133)..(1133): n is a, c, g, or t
  misc_feature (1142)..(1142): n is a, c, g, or t
  misc_feature (1146)..(1146): n is a, c, g, or t
  misc_feature (1148)..(1160): n is a, c, g, or t
  misc_feature (1162)..(1166): n is a, c, g, or t
  misc_feature (1171)..(1196): n is a, c, g, or t
  misc_feature (1203)..(1247): n is a, c, g, or t
  misc_feature (1251)..(1255): n is a, c, g, or t
  misc_feature (1259)..(1263): n is a, c, g, or t
  misc_feature (1265)..(1268): n is a, c, g, or t
  misc_feature (1270)..(1272): n is a, c, g, or t
  misc_feature (1275)..(1278): n is a, c, g, or t
  misc_feature (1281)..(1287): n is a, c, g, or t
  misc_feature (1289)..(1295): n is a, c, g, or t
  misc_feature (1300)..(1304): n is a, c, g, or t
  misc_feature (1307)..(1307): n is a, c, g, or t
  misc_feature (1313)..(1335): n is a, c, g, or t
  misc_feature (1338)..(1351): n is a, c, g, or t
  misc_feature (1353)..(1355): n is a, c, g, or t
  misc_feature (1358)..(1366): n is a, c, g, or t
  misc_feature (1368)..(1370): n is a, c, g, or t
  misc_feature (1372)..(1391): n is a, c, g, or t
  misc_feature (1393)..(1400): n is a, c, g, or t
  misc_feature (1402)..(1433): n is a, c, g, or t
  misc_feature (1436)..(1444): n is a, c, g, or t
  misc_feature (1447)..(1467): n is a, c, g, or t
  misc_feature (1469)..(1473): n is a, c, g, or t
  misc_feature (1475)..(1477): n is a, c, g, or t
  misc_feature (1479)..(1481): n is a, c, g, or t
  misc_feature (1483)..(1488): n is a, c, g, or t
caaggcattcattaatcactctgctatttgtttagacctcctttcctctgaagcagttcttcaatctgggtttcttgaccagtatcctaccgaagccagattctgatcattcagttcctcctccctcaggtaaacagtctctcctttctcgagtgcgttctttactattctatgagcttctaaattttctgatctgtggatgtattggaaaataagttcttggaagtcagatttcttttgctgtatatctctgatgatggctctaataattgatttgtctgtggacttctctttacatttctttattactgtttttgagtcccccattagcttcactgaatgtattcgtaatgaatccctaactttatcccttcaaaacatgtatgagcctctgctacaaaaggagaaggaacatttttgtgaatcactgtttttatcgccattaagtttcccctcgtgtcccatccaacaaggccggacgctgacttgtaggttttgctatcgtacgctgcatcaaaatggatcctggcattctgtgtaagttcttgtactctaaatcttctgtatgtaatctcagaagtttttaaagcttttaatcatttctgttctgtcacatatctttggatgttaagaactaaagcccttcctggaaaaannnnnnnnnnnnnntatnnnnnnannnnnnnnnnnnnnnnnnnnnnntnnnnnnnnannnnnnnncccannccccnnnnnnnannnnnnnnnnnnnnnnnnnnnnnnnnnnnctnnnnntnanncacntnnnnncataanaattnattctannnnnnntcnnnnnannnnnntnnnnnatnnnnnnnnnctnnnnnnnnnnannnnnnnnnnnnnnnnnnnnnannnnnnnnnnnnnnnnnnnnntnnnnnnnnnnnnnnccacnnnncannnnnnnnannnntannnnnnnnnnnnnntatannntnnnnnnnnntcnnnnnnnnnnnngnnngnnnnnnnnnntataccacnnnnnnnnnnnncaccacnnnnnnnnnnnaaatnnnntannnannnnanntctatannnnnnnnnnnnnnnnnnnnnnnaannnnnnaaannnnnannnnnnnnaannntnnnnnnnnnnnatantctcaccanaccnannnnnnnnnnnnncnnnnncatcnnnnnnnnnnnnnnnnnnnnnnnnnntatatannnnnnnnnnnnnnnnnnnnnnnnnnnnnnnnnnnnnnnnnnnnncccnnnnnccannnnntnnnncnnnttnnnnttnnnnnnntnnnnnnntatcnnnnncangtgtannnnnnnnnnnnnnnnnnnnnnnacnnnnnnnnnnnnnncnnncannnnnnnnngnnnannnnnnnnnnnnnnnnnnnnannnnnnnnannnnnnnnnnnnnnnnnnnnnnnnnnnnnnnncannnnnnnnnagnnnnnnnnnnnnnnnnnnnnncnnnnnannnannntnnnnnntat

SEQ ID NO: 14640 - DNA, 655 bp, Gossypium hirsutum
gaatcagtcccacgacactatttaaaaaagaaaagaaaagtgggtgatacgattcacttatgttgttggcttgtctatttttctgctgtatttgtattttttcttgcatgtttttttggattttcttatattgttcttttaggtttgatcataaattctatctgtactttttatgtatttgtttatccaagttggtgttgatttttattatcttttgctgttctaaaagtggtttttgtttttattgtagaattcgtttaaaaatagctacttatacccctaagaacatcctcataactggagctgctagttttattgcatcccatgtagctaataggcttattcggaactatctcagttacaaaattgttgtgctcgacaagcttgattattgttctaacctgaaaaacctcctcctctccaatcatcaccgaactttaagttcgtgaagggggatatttccagtgctggtcttgttaactacctccttgttgccgagtctatcgacacaataatgcatttcgcagcccaaactcatgtcaataacttgttcgagaacaactttgagtttaccaagaacaatatctatggcacacatgtcttgcttgaggcttgtaaagtcactggccagattaggaggtttatccatgtgagc

SEQ ID NO: 14641 - DNA, 365 bp, Gossypium hirsutum
  misc_feature (23)..(23): n is a, c, g, or t
ttttatttgcgttttcccctcanaatgaaatctttcctttctaaaccaatcaatacccataatcattcctatcataaaaaattaaaccctatacttccaggattttggccagaatatgaccatatttatctcactgcgatagaacccccttctggcacatcacaaggaaccagtcaacacacaatgcatttactgaaagtctaaaacattctatgtaagttataaaaatcctgctcttgcatgaccaaaaagggttcaaaaaaaaaaacaagcattccatacaacaatcaaaatttcaacttccccaaaaaggttctttcataagaaaatcccagggaaaaacacaatgatgaacctgaatgtaa

SEQ ID NO: 14642 - DNA, 461 bp, Gossypium hirsutum
cttttctttgtgtactatctgacatagtatgcatcccaagtccattatctattgtcgcagacttccctacttcctgagctccttgcatagacttttttataacccctgatgccttctgcagaatctcctgggattgatgaaaattacaatgagaaaaaccaattgattgcttagagaaacaaagaaataataacaaaacagaaaatcttccgaaaaccatccccatcaatttgctaagaaaactaaaagaaaaggagaaggctgcatgccttcagctcagtcatggcctggttaacatccatgattctaaaccagttttatgatcaaccacaactttttctagataattttaggtcattgagctatttcaaagttaaaatccaaaaggatattaaaaaaaaagaaacaaccaaaactggttactttctcctaccatggtttaactccggctggtggttcta

SEQ ID NO: 14643 - DNA, 686 bp, Gossypium hirsutum
tccatataacaaccggctaaacctaatgttctcatctctagcgagtgcatcgaccctctggttcatatcaaagcctaactacatacctttcatcacttaataatgctcattaaatggtaagagcataccccgaaaacactgtactactaataattaaaaactgcgataaatgaatcatacattattgtttcataaataaacaagaatgaagacacaatgtggtgggatagtgatggaggctaattcagcaatctattagaatgaagaaaatacctcactcaacatgtatataaatataaaattagggcaatcatcccgagaagagagggacttgtattctgtctaagagagagcagacaaacgagcaataatcaagggttagggaaggcatataaaataagcgcgacctcaataataatgggataagtccaaaagttttcggacatttgggattaaactaagacatggttttattattattattattattattatgtttttttatcaagttattgtaataaatcaactcgacattaatttaatgataaaattacttaaaagcctctttttaataaagatttgaatattaatatagtaatgttttcgttttttactatttttatatgaaatgtttaaattaaataattaaaaatataatgtttaagatcaacatgtgttgcgtgtag

SEQ ID NO: 14644 - DNA, 623 bp, Gossypium hirsutum
acatataactcttaatcttctcgtgaccatccaacccctccttcctcaacttcactaaggatggaacaacatgacagagtacctgtttccaaccggtgcaagagaatgcacatgagaaagcaacaaacaaaagaacccataaaaataaaagaaacttaggccaaaagcaggatactatggggtatctttctcttggcaaggaaaagcatgccctttttttcccctttttgatgataagttaacaaatatgtctattgagatcatagaagatggttaccaggactaacgaacaagaaaattttacaaccattcctaaatagatcatagagcaacactgcataatttgaaggaattcctagtcccatcatttatctgatcacaaattagtaattttccaactaaaaaaaaaaagcacccccaaaacccaaaggacccttaaactctaaaacccggaccaaaaaaaactaggttggccaaaaaactttcaaacaaaggaaaaaacttttgggcctttggaaaaaaattcccgcctggaaaaaacatacaaggctcccccaacttcttcccttcccccttttgacataaaaaaaggagggggggaaaaaaggggccaaacaagaaaa

SEQ ID NO: 14645 - DNA, 461 bp, Gossypium hirsutum
tacgcctcaacacaaatatttttgtcactagaccaataagttatttgtattaaataatatgtttttatttcatataattaatatgtaaaataatattgttcaaattgttgaataagattaaactcattaactattttaattataaaaatattacaaaacaatatgttacaaaaatgtctaaaaaaattataaactacaattaaaatttgtatgaaaaatgataaaattcaaaccttcttttgtgacttcgtctcttttttttttttttaaattccatttttaatttttaattggaaaaaaaaattaaaaaaacaattaaatccagttgattttcaaaaatccaaaaaactaatttaattttaaaaaaaattcaaaaaaattcctttgaaaggggaaaaatttttttcccaaatcaaaaaagaaaacccctttttgccccctgaaaaattcaaaaaaaaaaa

SEQ ID NO: 14646 - DNA, 672 bp, Gossypium hirsutum
  misc_feature (36)..(36): n is a, c, g, or t
cctataaacacaatcatgtacgccccctacaaaganctaaagaaagttataacttacagttctccaagttcgactaaattaccaagttcaggaggcaatgttccagagagatcgttattacccaaagagctgcatgacattgatccacataatttttttgagaaacttcggggaaaaaaaaaccatttttacaagtaaatgcttgcttaaaaaaagaactattttatcctttataatggtgacataaagaattcgttgagagttccttcaattcttacagcagatatagcttcttgagatttccgatctcctttggaatgggcccagagaaattgttttgggcaattgacctatacaaagtaaaataaataaataaataatccaaagaaaggagtattcttgaatataagaaattaggatgaaacaaaatgaaaattatacatagaaattagggaacagaatgatttcttattctagtgtgatagaagagccattgtctgtcatatataaaacagagtggacttcacacactactgttttaacttcagttcaaatcagccatcgaattccactagtcattattttgaaagatagtcaaggtaacctcattgttaacctattaatatgttgcttcaactcttaattttttggacacggtatggagatatgatc

SEQ ID NO: 14647 - DNA, 683 bp, Gossypium hirsutum
tactccatttctcttccttctcccttatctccaactaaaaatcataaatgagatgctgataagcctccaaaccctccattttactcccaacaataaaaccaacaaggcatggaattcaataatcaaacaccaaaccaagctcaaaaatgaccatgcaattctctctacatttacccatatgcaatctctgggtttaacacccgataaggccactttgcctttggttttaaaggcctgcgggaagctcaatgccattgaaactggcaagagaatacactcgagtattcgagacactaacttgatcgaggatgttcgagttgggactgcccttattgacttttatagtaagtgtggtttccttgaagacgcgcgtaaggtgttcgatgaaatgagtgagagggatttggtctcatggaacgcaatgatatcaggatatgcggggtgtgaggaatttgaggaggtggtttttttggtgatgacgatgcaaagagagggttttaggccgaattctcgtacgttggtagcgatgattttagtctgtgacaaggttgcggaagtgaggttaggaaaggcgattcatggttattgtttgaggaatgggttgtttgatttggatgctcatgttggtactgctttgattggcttttacctgagttttttttatgtgagggcttctcatcttg

SEQ ID NO: 14648 - DNA, 608 bp, Gossypium hirsutum
ctgctcaaagacttcaacattgccagtgtgtccaaaagggaggttgtgaaggtgctccaaagataaaagagcagaagctaaagtcgaatccttgagaatgtcgtgtctttagaatgaatgatgactgagtcactgatactttggtagacaggccagatcataattttcatacaactaaacagtgctcgttgcagtttagttgctatttcgaaataacattggccacagtccagaaatttaaaacatccttgatataagtatgccacagtttagcaactaaactacgttcagaccatttcacaactcctttaacagcataaacattattttttatggaaacgctacccactacaaaagacatacattccataatagaaccatgatatatgtaaaaacaaaacaaaacaaatgcgcaggtagtatgaaatactgcactatttaattatcaaataccacaggcaaatgcacaattatatagcagataagtaacatttaccaggctgttagcttggtagaaaaacataatacagaaacgcagaaggtttgtttcttgaacagctttgagacagacttcagaacagtatatccttacagaagcctcaatagca

SEQ ID NO: 14649 - DNA, 626 bp, Gossypium hirsutum
  misc_feature (615)..(618): n is a, c, g, or t
acaatatcctcgtcagtcaacttttcacaagggtccacttcctgtaaaaaagcagctaatctcctagttctcaagcagggaaaattccagacaacacaaaaagatagagcatcaattacataagcgctttagaaagacagaatcataatctctaagagcttcacaaacattgactgaagaagtggatcctggctcctccaaacaattatttagttgacatgtcctgactttttccatcaaccagagatgaaaaatctttccaacaatgagaaaaaaaaatagaaaacttagcaacagcagaaaattcagtgagcaacattccgctgccccacttgaaattagaaggcaacacatacaaatatacaagataataagtgtattgcttgaaacgctaaaaatggaacatataggaaaataaaaacctcaccatcacagtatcttctaagaatgtgcaataaatatctaacaaaaaagacaaaaaaggaaaattcagttctctaataaatatctcagctttatttgattatctaaatattaaaatttctaaaccaaattttaatacaatactaatgatgtcgtaaacattaaataattaatattttcagactcacaagnnnnaaattgcg

SEQ ID NO: 14650 - DNA, 645 bp, Gossypium hirsutum
  misc_feature (241)..(241): n is a, c, g, or t
atttgcggtggcggccctgtttattttgtatacttgctaaggcattattgtagaggtgggctggttcggggttttgctcggctttcagttatgggggctattgttgtggcagtttttgcagcagcatatgggccatttgtgtatcatggacaggtaggtcatccttttggtttacttttatgtgttctggcttattctgcagcgagtttctcttttaaccatatgatttgcccttagtttngggtttttaaccactggccctcaatctctccctcttgtcctggttgctgttgtaccctcttctcattcatttagaagtacatatttttatgcaaattttatggtttcacttattagtcatgctgaaattgcgaatgtttatagccattagtttccttgactataatatatagtgctaagtgttctccaaataccttgcagatacaacaagtcatccgccggatgtttccttttggcaggggactttgccatgcttattgggctccaaacttttgggttttttatataatgttagataaagggattgctttcttgttgaggaaatttggcttcaatattccggcaccagtaacttcattcactggtggactaattggcgatgcatcaccatttccatattaccct

SEQ ID NO: 14651 - DNA, 414 bp, Gossypium hirsutum
atggatcaataactatcgacgagtattagaagaaagttgtttgaattttggtttgcatatttatgacattcaatgttatttcatgaaaaaaatgaattgtagaaaaggggaatgagattttttttattggtatagccggtgtgaacagagaactccacagaataatgattttaacaatttaatgacttaaataatattttagtgatcattttataactttttgaagttgagtgactagaacgtaatttactaataatttagtgacctttgtgtagtttaccctaaaatattataaacttaattccaatattatttaataaatttttattgtaataaaaattaatatatataataattatttaaatatttgtggttaaattgtgatattagtccctatactttgtgaaagttgtg

SEQ ID NO: 14652 - DNA, 492 bp, Gossypium hirsutum
  misc_feature (13)..(13): n is a, c, g, or t
  misc_feature (15)..(15): n is a, c, g, or t
  misc_feature (382)..(382): n is a, c, g, or t
  misc_feature (392)..(392): n is a, c, g, or t
agatctgctgganantcatgaatttgaagatgcatgtgcagctgaactaatgcattaaaagctgattaattttggtgttcttcaaggcaactattcggccaagagtgatcaagtttttcatcctttcaagcttggccgattctcttcccaagggcgtataaaagctgttcacactatgtctattcggttcagccatgttcacacttcaaggctcttcaaaaccgtccattcacacttctaaatggctgttcaagttgccaattaatgctggtaatttttcatcaatagttgcttcatgaatgacctcattaaactccattggccgaatgtagctgctgccattttttccaaatcattgtaagatcttccctgtggtctattntccccaaaantgtggtgagcgtataaatgagattttaatgaaaatttttgcactttttgcttataaaaaaaaactaaaaaatatgccctctccgacaaaaaattaaacac

SEQ ID NO: 14653 - DNA, 370 bp, Gossypium hirsutum
attttgtatgtgatcatgtgattttctgttaaacgtgatgatatatgttttcttaatactcatgtaatgtgacatatagcattattggatatgcacgtaatatacacatgacactgatttgttggtattctgatttgcatgttaagcatgctactattttgattttgattcacttgattaagcatgccattattctaatttagacttgtatgttaagcatgtcattattctgattctaatttgcatgttaagcatgccactgtgttaaatcagaataagatttgattcgcatgtaaagcatacctactgaaaattttgttttgtatgccatatcaaatgcatggggttgggataatgatgtacagaggaa

SEQ ID NO: 14654 - DNA, 672 bp, Gossypium hirsutum
catgttatgggaatgagttacatcatccggttaatatgtgatacgaagagataggcttatttggaatgctactaagaattgtggtaccagaagtcttgaagttatcagaggcaccccaccttgaggtttagaaggtgcatttgctgtttagtactgcaccttgacattgtctagccatgtgcctgagccctttgtagtgcagtgaaaacacagattctacaatgtaaagttgtcttaccaaacaatttagtctttgggaaggttaaaggttctttaacaaaatcttttttgtcctttttctaaaattctgatatgtattgttggattgttgggttgacttagtatgcagtcttgtggtcactttggtggttttgttggtaaaagaaactggaaagaccatctttatggagtatacatttataaacagtgaatcataaatgtttagctaagaatcatgaggtattgatgcatatgaattgcttaaaattttttgttttgttttgttttgatcagtacaagaataactagtttttttttgtgtacataagggttttccttgaatgtaagttgggaaatgctttagtcggccagagtaaattgttaaaggcatataccttgatgctaggtgcagcactaaatagaataagcatcatggacctatcaagaaaaatt

SEQ ID NO: 14655 - DNA, 556 bp, Gossypium hirsutum
gctttgtattgtgaagtcaagggtgttctttttccattttaatcttaaattgagtgttaccgagagtgatagaaaaaacggagactaggtttttccttctaatttggtttttgtttaaattcggctgcaatggagccgcgagttgggaacaagtataagctcggtcgaaagatcggcagcggatcgtttggagagatctatcttggtttgtgcttattcgtattattattattatcttgtttgccttttgaagtactgttttttttaatgataatttccttttatattttaggtaccaatattcaaacgaatgaggaagttgcaattaagcttgtaagttttttcttctttcaagttcttcgactttttatgttaatttgtttgggttttcattgcaatttttttattagtgtcttggtgaacaacgaaagaaaaccttctagggtttaacagtagataagcagctatatagcttttctttttgcctcctaatgctgttagtgttaagaattgtttgtcaatggtaattttactgccaagtatggtaatggttctg

SEQ ID NO: 14656 - DNA, 449 bp, Gossypium hirsutum
gtttccgatgtcatagcaagattatcaaaagacaagcggctgagattacatatcgaaccttcgacactaaaagcttcatactctcacccaatggacttacgggaccaaatgctccaggaggcaaaagcccttccctggcactcgaattagaactgcttcaataaaagaaaaaagtcatgatcctatataagtatttgttaatatggaacacatttaactctgaaaggtaatgaacctcaccttcccgtaaatatacaggacctataacctgcacaagttatacaccaataaagcaatcagccaactaagaaagacaaagctggatatcatgacattaagaaggcagaatatatgacaattaaatagcaagacagcaatagcatgcaatatggttgatgtggcaaaagataggtttatgaaaaagccaagaattccatcctatcttcaga

SEQ ID NO: 14657 - DNA, 611 bp, Gossypium hirsutum
tcattgatgacgctattcgtctttgattgttccccttttcattaatcgataatgttttttcttggcaagattcgcaagcactaggatcaatcacgacatgggacgaactcgcagggaaattcctacaaaagttcttcatcattagcaagacgatccaactaagaagggaaattttgatgttcaaatagttagaagatgaaagctttcacgaagcatgagagcattttaagattttaattcagaaatgcctacaacacggattgtctgagtggttacgactgtaaattttctacaaggggttagacgtgcattcgagttcaggattaaatggagcagtaggaggagccttaataaacagaacgtacgaggatgcgtacaaattaatagaaagtatggagatgaattcatgccagtggccaactgaatgatatacatatggccaaaaaccatctaaggtgaaggctatttaggaagatgacagatgtcaacgactagtgcaaagaatctatcgaatagatggtgaaaagaatgcaccatttgtgtatagaggagacaaaccacacttgcaccatattaataatcctactgaagatgtgaactacatcggaaaa

SEQ ID NO: 14658 - DNA, 573 bp, Gossypium hirsutum
gagcgtagagtaagcatcaaacttctctctttctctctcactttttctatatttccaccttttaatcttagtttcatatgaagttgtcgaaattatgatataatgttgaaaaaattaaagtgttttggttgaagaactggttttaggtgaggaatttatttgaatttatattttaaaagctctaattttaaagaaaatgtaagatgcttgatctcaatatttttattttattttgtttgatttggattcttttgagcttgtttatttaatttttttttcttttggggttaattaggcttcttttgttaaattatgatatgcggctcaaaaatttaagtttttttgggttaaagaactgatattaggtaagaatatatatatatatacacatatatatgagtttagattataaaagctccttttgtttaaaaaagaaaagctgcaagatgcttgatcttaataattttattttattttgtttaatttgccttattttgagcttatttatttggatttatttcttttatcctttcctaaatgttgtttttggttgatgcagattgacttgagctc

SEQ ID NO: 14659 - DNA, 658 bp, Gossypium hirsutum
cgtccgatgatgatgtttactacctaccatgcagcctgatgtagacttcggaatgagtatacttggaggtgatattatggctatacccggactttatcagtttgtccaggtattgtactggtaatttctatacaaaaaatagtcggatataattgtggagggcttatgaacttagaattttgtctgaagaacggttggctaactgttcgagttgcctgcagaaaacaattaaaaggcaagttgcaagcctctacatctggccacaagcactagagataccgattcttgatcctgcaacgtaagtttctattacgtactatgttatatctactccattttttgttactgagctttctatataactttaatgttcatacatactgtatgttgtgaactattttaacttttaaggccttggttatattgcgttaagttctggatattgggtacttaaccatgtgtactagaagtacttctaataattatttttgatcgattcttataaaactatagagttttatgcttgttggccgagtttttagtttggttctttttttagggtggctgtaaagaaacctgttggaatactacatgtaaaggttgtgcgggcacaaaagctcttaaagaaggacatcctcgggacgtcggacccttatgt

SEQ ID NO: 14660 - DNA, 742 bp, Gossypium hirsutum
  misc_feature (679)..(679): n is a, c, g, or t
  misc_feature (683)..(685): n is a, c, g, or t
  misc_feature (691)..(691): n is a, c, g, or t
  misc_feature (708)..(713): n is a, c, g, or t
  misc_feature (726)..(726): n is a, c, g, or t
  misc_feature (728)..(730): n is a, c, g, or t
ttggttgtaagttctcctcttcggaataccatcttcaagcattgtaacacaaatttctaccataaaaccttatggatatcctatgttttatgctggtttaatagcaagaaaaacccaagattcctttgtagctttagatcgtctatgcatctatctgaaattatgattgtggctatgtttaaatttcaatggtcctttatgtacttgacgtattatgattgtagctgtagttcgtaacactccctaattattcatctcttttgcgtataagctcatcattccatgcttgttttccatataatgttttatggttttatagtcgaacctctgatttttcccttttcgacaggggaaactttaggtgcagtataagttcaataggagtgcaatcccaacttggtatactttcacaacttggtatccatatattccacttagaataggtactcattatttatccatttttccctttttgatcagatttaaagctaatattgaaaggaatcatttaatttaattcatctatattattgcccaagttgaaaaatgaaatatcatgtttcccttctaatttagatgctaatcacagacaacctgcgaaagtgagtttttattgcataaccttcatttttaatttttaaaattttttttattgcataagctctctctcccacccccnttcnnntttccnccctcccctcccccccnnnnnntcccttcctcccncnnnacccctcccttt

SEQ ID NO: 14661 - DNA, 352 bp, Gossypium hirsutum
  misc_feature (54)..(55): n is a, c, g, or t
  misc_feature (57)..(57): n is a, c, g, or t
aaacaatggttggcttaaccttaacctgtaccgaactactattctttaaagccnntnaagctgaactttttttttaattgacatagataatgattgaaaatacaattgacataaaaaaaagtgagaaaaggtttgagggagaaataataataaaacaacacaatgaatttgagttctggaggagtcaaatgggaaacggtgttgaatcaacatagatcagagactaaagcttcaaaaattagatgaaagaaagttgattttagaatagaggatgaatgtgggggataacgatgacgattcgttacatttaaagtttggaggactcacttgtagagatgcagtatgggattga

SEQ ID NO: 14662 - DNA, 567 bp, Gossypium hirsutum
  misc_feature (14)..(15): n is a, c, g, or t
  misc_feature (53)..(55): n is a, c, g, or t
  misc_feature (57)..(59): n is a, c, g, or t
tgttccctttcggnntagtacacacatcatgttagccaattttcccacttagnnncnnntgcacatatatgctcatttgtttggctcaacttcacctatctaccattattcatcaaaagaacatgaaacaacaaccattctctttaacatcttccatagccgaatactcatatcaccaccaacttcaaaattttggcatgggctaagtaagggacttagtatctagcttaaactatgctaaaatttcaaaaactaacatgcatttcttaccttaattctaactcaaaggtgaccaaatggctgagctttttcctttcttcctctcttagtttcggctatcaagaacaaagatggacaagctttttccctttcatccttttgttaacttatttattcttattttatgataacaaagccattaaattgataggggtaaatttaaaatggacattctattcattcccatcatgatggccggccactacacataaaaggggagggttgacatgcaaatcctcctattttgctctacaaattatttggccactacaaattagcctatagcaa

SEQ ID NO: 14663 - DNA, 592 bp, Gossypium hirsutum
ttttttgttgaatttcaatggtgaactttatcgtagttacaaaatcataattcacactacacctccatagcctattcatatttatccatgtattttcatattactatgttatttcttcgaggtaaaaacacacaaggatagcctcctttgttttcaatggggagacacacaccctttctttgctctttatttttttatttatttacatttacaatacaaaatagagaagctcctctctaagcttagcttcgcttcagagtgcagcatctgtccttttgcttcacaaatatacactctccatcacccactataacttcttctctgcctttctaattccagcaaatccaatctttcaattttaaaacaaaatacgtcctagttattatttattattctttacccacaaaaacaaaaacccaaaaaattcatattctattttcttctttctgataccaaacctgttaacttctcttatcccactgatcattaatattctgaagcttctattttgctcataccttcaaattttttttccttggttaggccttgaaagttgaaaggcactctccctctctcagtttgtgatggatga

SEQ ID NO: 14664 - DNA, 574 bp, Gossypium hirsutum
tcactaaccatccaatcctcacagccactcactacaccacctcactcaatcatcgtctaaccaaacacatccctcttcgccatcaccatttcccttgactcttatgcaccactcccacctttccaaatcccatcaacagccaatcgaccacctcaccacactcaaaaccatcactcattcgaagccattcaactaaaaccatcctatggaagctattatagtaggcaaatttcactagaggtaagtacctctcccaactactttcaaattattatacaactatatagcatgtcctcaagaatctgaatcattctcttagattagtcatcaatctgaaggtgaaaagttattttggaattcaacttggtatccaacgctttgtataacttgccctaaaacctagaagtgaaactcaaatccatatatgaaattatagagtagtcaacccttaccaaaataaaatgagcagactttgtcaatctgtcaacaataacctaaattgaaaatttttttcttgagatcaatggcaaaccaactacaaaattcatgaccactcattctcatttccactcaa

SEQ ID NO: 14665 - DNA, 658 bp, Gossypium hirsutum
ctttcatgatagaccggatttgcaacaatccaagtggttgctttactgtcacaatcagggctggcagaagccctggcccccctaaaatttataaaaatttaaattaacaaaaattacactttggcccccttaaaaatgataaaaatttgatttaattctttaaaaattataaagatctagatattaaaatagtgaaattgcatccctagttcttctagcaaccccttaagccaaaccaattttgctacagtcaaggctatgctccttgccatagggcataaatccgtaatttctttactttgtaacttgatcagtagaaatccgtaaaattatgctaatatctctcttcaagaataaaactcctattatcgcattaactcgatccatggattcccctattagatttgactctaatcttgtaaatttatgttgtcctatgtctaggattgtatgcaactccattaaattacgctagatttactcttaaacagggtctattcctcctctgatttaagcacatcaaatatggatcaataatctagaaatatcaaaccaagaattaagcacacatatttgagaacaatatctaaatatttattgcttaaaataaaaatcaaacgacagaattcatcgtagggttcatctccctcaggtattt

SEQ ID NO: 14666 - DNA, 596 bp, Gossypium hirsutum
  misc_feature (573)..(575): n is a, c, g, or t
aaaaaaattccccttaatttccctttctactactaagttatgagccttatcataaaaaagaaataaatagtgataaatctttgaataaaagatacataaacttaaccaaatgttgagtacttgtggtaatcgatcaagttctgaaatcaattatggtattgcttgcatgaacatgagaaggctgttaaacaaacaatgaaggaactaagcaagtatttaagtaaaataggtaaccttacatctgcttatgctcattatggagatacgacttttcgcagtactcagcagctgaataaagctggggccttaagtccttgagctcccataaaatcaaagggtcaactaatcaattaatataacaaagaaatgctgggaagctcaaaaactcatgaaaacaaattttgacatcaacaaggagaacaagttaacaaactaaattaaaatcttaacccttgcaaaagttaaatttaaaaacatgaattttccaattttcttccaaaaaaaaattattaaaaaaaaaaaaatgaaagcttttccattgcataattcaattctcaattcgcattctacttnnncataaaccatggctctaaact

SEQ ID NO: 14667 - DNA, 373 bp, Gossypium hirsutum
tttggcttggcaaaattgggacctgtgggtgacaatactcatgtttcaacccgggtgatgggaacatatggatattgtgccccagagtatgccatgagtggcaaattaactcttaaatctgacatatattgttttggtgtggtgctattggagttgataactggacggaaggcaatagatactagtaagaagcatggagagcagaacttggtttcatgggtaagttagcctttgtttatttataatcttttttgtttttgtgtgtgtgtgtgtggcttgatctggtttgattcctttccaatcttttttacgtcctccccttctagtggctatatttcatatatatgttatttctctaacgtcgtcccttgca

SEQ ID NO: 14668 - DNA, 664 bp, Gossypium hirsutum
catacatacaaatggtgcctggtttttaaggaatcattgacactggtagcagaagaagcaatatccttatggccaagggtgagattatttttgggcttttagaaatggtttacccaatgaaatatctcaagacccacaagcagtaaatttcccttatatactgaaaaataattctgaagtcacaaccataaatttcggaaggcaaccgtgaattgcaaaaagaatataaaagacaaacttaaagtccttttttagggtttcgtccctttgcaagaatagaagataaggtagtaggagccatgtgatgatgcgaagtacatggatgtatggccttttcatgatggtggccatagtttttcaacttttttattcgataacagaaatgttaaccactgctcattgtttctgattaaagtaacatttaataaatattttttgggtaaattacatcattagtcactaaattatggataaatttttgttttggtcatttaactaaaaagttacaatttgatcactgaactccttgaaacttttcatttaagtcactgaactatttaaaagtttttatttaaatcactaggttgttaagttttttttaaaagtttcaccaacaagctccaagcaacaatttgtcgatcgatacggtgaatcaataaccatc

SEQ ID NO: 14669 - DNA, 765 bp, Gossypium hirsutum
  misc_feature (670)..(671): n is a, c, g, or t
  misc_feature (673)..(679): n is a, c, g, or t
  misc_feature (688)..(691): n is a, c, g, or t
  misc_feature (696)..(700): n is a, c, g, or t
  misc_feature (709)..(712): n is a, c, g, or t
  misc_feature (714)..(720): n is a, c, g, or t
  misc_feature (724)..(724): n is a, c, g, or t
  misc_feature (726)..(726): n is a, c, g, or t
  misc_feature (736)..(745): n is a, c, g, or t
  misc_feature (747)..(747): n is a, c, g, or t
  misc_feature (754)..(761): n is a, c, g, or t
tgtgagtcgagtcgttgatgtgcccgatcataaaatagagaagtattgctcgattctgaaatgtagtttgaaagttggctaaatatggagtaaggtttcaaaaattggttcaagagagttaagtttgaaatgatataggtttcggcaaacaagaaaataataagaaaggaataatgtggaggaaaaagatcaaaatggacttaaggtcaagaaggaatcagtaataaaatggagtactaacccgattcttataagataattaaaggtgatgaaaaggaccttgacccgctaactataagagttaggaaccagaggtatgaaatggtggatgaattccacactaggatggtgataagttcaaagagtcgggttgacaccactagctagctagataagtcagaacgagactcaaacaaaataggataggaggtaacctcacaatcaagttttaataataaaatgtctaaccttgttacaaagagaaataaactatttatagttttcatatgatagccgaatggacagaatagacaagctaaaagactaagtaatttggccttaaatgtattaaactaatctagaaatgtatcccttaaaggctatgtctaaattcggctgaatgaatcttcaatgggcagcttcatgtttaaggaaatgaacttggtggcanntnnnnnnntccttttcnnnnttttnnnnntttccctcnnnntnnnnnnncccntncccccccccnnnnnnnnnntnttttccnnnnnnnncttt

SEQ ID NO: 14670 - DNA, 604 bp, Gossypium hirsutum
  misc_feature (564)..(564): n is a, c, g, or t
agcttgagactcaaatgcaacggtaatcagaacaaaaaaatcctcatgtttttccttgttgcaggagtttgattccaaagcctaaacactggagaggatacagacttcgacctgagcgttttgagttttggcaaggatagccgtcccgtttgcacaacaggttgcttactataataactaggctgtaaaatatgaatgaaagaggattttgtccaaaatctatcccaagttcaaacccacatatataaacgtttgagcttggataatatggaccctttttaaggatctatatttggataaatgctatttccatgtgggctgataattgagtcaactccatgttagcttaagctgacaatgctttaaatatttttcaagaagttaaatcgccttgagcagtacttcatgcaagaccaagccacccaaagctcttccctacccaatttgttttatttataaaaaaaaaaaaaaaaaaaaaaaaaaaaggaaaccctcccccttcccaaaaaatgcaaattttgtactttaaaaaggggattttccctaaaattacctcccccttcnaaatttcttccttcccgaaaaaagccgggtttaccttgga

SEQ ID NO: 14671 - DNA, 613 bp, Gossypium hirsutum
  misc_feature (510)..(510): n is a, c, g, or t
  misc_feature (513)..(513): n is a, c, g, or t
  misc_feature (552)..(552): n is a, c, g, or t
  misc_feature (576)..(578): n is a, c, g, or t
tctctgcctatatatatatatgtggttgtactgcttgactaattttcgagcatactgataggtaagttacgattattaattagcagtgttaaatggtctaagatatgtgttgtattttttctttttactaaaatgccatttcattacttcgggaggacgaagtttacaaagattaatatatattagattttattaaatctcataaaggatgacaaaccaaattagagaaaaaaaaacaatacatcatgcctaaatattagggtattcaaatttcagttaaaatcgagttaacctatcgaatcgatctaaatcgattaattagttgattaatcgatttaattcggtcggaggttggttaataattttttagaagttcggttatcagttaattcggtttgaaattgggtaattaacttaattaataatcaataatacaaattatatgtagttttaattcggacaatgaacgttatcaaaaaacaaattaatttaaaaaaaaattggaaaaanccntttaatccggggggggggggggaaaaaattttttgaaangtcggggtaaaattaattccggtnnnaaaaggggggaataacttaattaaaaaacaaaaaa

SEQ ID NO: 14672 - DNA, 548 bp, Gossypium hirsutum
gacgtaatcacaaggtacctatcaaaaaaataaatcacaagttgctatgtacgagaacatgaaattataggggacataaatgtaatttaccattcacaaaaataagaagaagaaattagtgacacatgactaagcttgatggttatatgcaaagcggtcagtagttttttttgatagatcattcttccaagttcaacttatttgagcaagtagaaagaaagaactttagacattcaatattctttagatattaaccatatctttgaattaagtaatctttgaatagtgctttctatcaattgagaataatggaatgatactagacgtgcatacctttaccacaccagcatcatcttgtcgaccccagccagcggcagatccttctcattagtaacattataagtgttaattgtatggaagacaactctaaaagagaactaaaatgaaagggcaacacacaaagacaaacatggaaaactgcatcacaatataacatatatgtttggtatataagatctaattaacaagttaaccaagcgttgctacac

SEQ ID NO: 14673 - DNA, 537 bp, Gossypium hirsutum
ttttaatcttaatttataatttattaagaattgtaaacacgcgtagactcgtgtaacttaaacataaatagaagaagtaatatatactattaagtgctaatgaaagatggtcatcaattttttaaacaaatgaatgaacgttgagggtagtttgtatatatacacatgtaacgattatttcagttcgtcaagaaagttccaagaaattataccaatccaagatgtgtgcattagctccttttccgaccccaaactggcccttagttaatcccattggctacgaacacaactatatgatgtatgaaggcggcagtgaatgtttagagtcattccttcaatttcctccaccaccacaagaaggaattccacttgaatctctatctcctgcatctaatttcacccaaaccagtaattctgacccctgcatagttaagaaactcaaccacaatgcaagcgaacgggaccggcggaagaaggttaacaatatgtattcatccctccgttcattgctgccggtagctgatcaacggtactaat

SEQ ID NO: 14674 - DNA, 551 bp, Gossypium hirsutum
tttcacaatagagacactatgcaccggaatgtagcatagattaccaaattgttatactaaatataccctgtctaaatctcatcaaattttatttcacaaccttcctatagtttagatctatatttacttgttcaataatgttttagctctgaactctactaccaaaactattactaattgttaagatccaatttaaaatcacttgacaatagggttagagacagaaccagaacatggggccactgtaaactcaagatagaaccagtaagggataacaccacttaaacgttagaactccaaatcacattaaacccaatatcattaagtgaaagaattgaatatattacatggaaaataaataatttttaaaaacaagagaggtctaatacagtgctaaacattcaacctaaaactaattaacaataagtggaaaagttgtactccaaaattctaaacttaactgatgtgagataacaccaatgctctagctcttatgaatttcattgttttatcacacgtgtatatgaacggaagctaggttggttaattac

SEQ ID NO: 14675 - DNA, 631 bp, Gossypium hirsutum
aggtccaccccaaaatttacggctagtgattggaaaacgagatcaccatggggtgcattttgtaaaaaagagaattgaacaagtttgatcggatcatctaacaactttcgcataaactggagagcttgaagtctagcaatgccattaatggcactcgtcatagccttttccttccctttttgagaaccgaatacttgagatagtgatcgatcattatcatcgggtccatactcattaagaaacttgtgtagagtaataatttcactgatagacgcgtgccaaacgtctcgccttaattcaccacccaagtcgacaaactccagcacccatgtttgtgatctgaacagaaagttgacaacaaaagatacatgatcgaaccaaaaaaaaagaaaaagtacccagaaattcaaatactgtaagtaaaagttcatgaaaaagacccaagaagctcaccccggacccgatgaaacagctactccagagtcaaaaagcccagaattgaaaggtccaacttttactttcttaacttccaatccaggccttgtaagatcgagtcttattgcattgctccgccctttaaatttaacagcctgcaacaacatgaccgtcatatcaaatacttgggaccgga

SEQ ID NO: 14676 - DNA, 660 bp, Gossypium hirsutum
cagcacccgagtttttgtgttatttatagtaataaacctcacaaaatttggtaccttgttttcgacaaaatagtctagttatttcccaactttcaaccaacatgatcttctctactactcttgaaccctcggtttgcttaaagagtgggctctaaccacacaaaccaatcacataatgaaaaatattaattttctagtggggaaattaattctctctatgggttagaaatctaatacgagctctcacgaaaaatagaatttacttctaaaataaatcttaccataattcgatagagtagctgtgctcaacaaagttatgtgatgatatatgttatgtttccagggtctagaatagatgtatcgatattcgggttttaaaaatgatacctctgcaatttatgaagtgcaggaaatcaatttcgctagttggtattgatattttgccacaagtatcgatactcgaggtaaaattatatatacttttttaatggtactgatatttttcgaaagttggatttttaatacgagaaacagtaagctaatttggtattgattttccaagtggtatcaataccacttgagagaattatcgatatcactctaccaatttcaatacctacataacatatttgggaaattttgctgagtggtcctaatgca

SEQ ID NO: 14677 - DNA, 659 bp, Gossypium hirsutum
ctgtacagtaagcattgtttgagcaattgagtttaggtggcttgaagattgattgagcttccttccatgttttagcaactaaccaaaggttctcgccaaatccgtccgatgtctagttttaccacctattaaaagtcttgaggttcttaaataagtttttttattgagttactaaagtaaaataataataatatatgagattttttacgcagtttgaacataattctatacttacaaaatattctcaaaagataaatcactataatctttattttataagagatgatttaaatctaacttaattgtagtgattataaaacaattatactcacaaatgtttgtaatcactgaattttgcccgggtagggttttgggccaggctggtctcatatgggcctaacaattgggcccattgggatttaatttcagacttatttttgctcatttttaatttttgttttaaacattaataaaatagtaataataaaatttgaaaaaaatgcaaaaaaattaaaattacgttttaacccttatactttttaaaatttacattttgaccctaaaattttctaaaattacatttcaacccctaaactttcttaaaattacactttgacccctaaactttctaaagattacatatcggccctataatttcc

SEQ ID NO: 14678 - DNA, 372 bp, Gossypium hirsutum
tgaaaagcttaaacaaaattgaccatgctcctgttgaacatatatccgatattcatacttagagatcatgtaacataggaagaaaggtgaaaacccttgtagaaaatagaaaacagagggcaagggactgatttcttgatgctttttaactagtttcattaccccttggcttgatttcattttgtcaaacagggtatttgataactttcatgttgcaaattcttaccttgtgtgtgcatgttgctaggtactttcaccttctcagttttaattatacattagaacaaataaagatgttagatttagattgttcaactcgtctttggcaatgtgcattctcgttttctgccttgtttctggtgataaaaaaaa

SEQ ID NO: 14679 - DNA, 697 bp, Gossypium hirsutum
tcaactcaacctaagacttaaacggaaacttatacaaaatttttaaataatttaataacttaaacaaaaaatttaattttaacattataatttttcaaaattaaataattaaaataaaaacttagaagtatcaatgagtgtcaatatagtttaactattaaaattaaataattactaataatttaataaccttcaatataatttacccaaacaaacctaaaataacatacatttataacatgacgaaacctaaaatagatccaaacttcaaactaactttagaaattctaaaatatgtattaattaacccaccaaaaatataaccagacgcatgaagttttgcttcctctgcccctaccttgaagattgttctaagcactataaactgattaattaaaaaggcaataatgaagaagaagtaggtatggaaactgattaataagtatctttgaccactgattaaaaaataaagcagcaaatccaactttcagccatggttaaacatcacagagcaacgacagaaatatttacaagcaaacaacactatctttacgtaatggaggctgaaagagctagtgactccatgtttccaaccatctttatataaagttatacctaacacactaatggatggaaatttgaagaaaactcagttaccccattccatgataaggtatttttatgccgccttggcaaa

SEQ ID NO: 14680 - DNA, 703 bp, Gossypium hirsutum
gttttgaggctagttcagtttacatgaatcctatttgtaattaagtgtgtgtgatatgcaagagttgatagataacattaggataaaccacgtttcactgctaagaggatactagtataattaattggattactgtacttgaatgaaatttactgaattctcttgaaatggagaggcttttatgggttaatattgaggattagaatcccttatttgtatgctttctgttctacccctaacaacttgctttttcttatagaaaaaattgcatttaactttcattggtttagaaagatgtattggtcaaaataatcgttctattcatcttgcacaccaaacagaaattattctgtcctaatcttggacatgtcaaacagagaataggataaagattataatgcggtttcagaggtggagacaatgaaagaacacaaacagtaagaaaaatacagataaaggctaaatgtgaaattgaagttggaactagaacactgtggtttagggttgcagaactactaccgaataatgtccaactataattgtctaaaggaaatatattactagggttggaatggcataaaatcaaagataaggaagtagtttgcattagatgaaattatcctattcactgagtgtaagcttaagaaaatggtaggatgatttttgttttctacatattgtgtgctagagttcaagtaaggaa

SEQ ID NO: 14681 - DNA, 401 bp, Gossypium hirsutum
gatgcacccaaaatgaaggctacattcaaaaaaagttcaaagtgtaagtccttatttttctcaaaagcaaaatgagaatttgctgttaatatttaatatattatttttcaatttgatatcatcaaaacttaggaacgggctttatggagcttaatacttgattcagatttcaggcaaagattggtcttacgcggcttactctatagcccgtcacttgtttcaatttggaccaatgaatacacgacgtagttgaaattaaaggaaaaaaccaagaagaaaccgacaaaacacaagcccgaagctttgggaattcatttttaacctagtcatccgattttacttttttttttccccaaaagggaaaaaaaaaaaaggggggggggggcctttccgaaaattta

SEQ ID NO: 14682 - DNA, 706 bp, Gossypium hirsutum
tcaaagccattcaagcttcctttacatacagtagtaaccatgtttttttccaaaccagaagaattacaacatacacaaagaaccccatactgtgtctcagcaaatcgaatgattctgagtcggattctgaccccgaaccggaaggtgacactcgaaaacaagacctgcttgctcaaatagctatgttgcaggctcaaaaggttcgtctaacggattatttagacaaaagatcggcttatctcacacaatttgctgaagaagctaatgctgagtttgataaagttggtgaagatgctcttaaaggacttgaagaagctagtgaaagggtaggggtttatataaaaaagctggttgatatgtaaatctgcttgtgagtgatgttattcattctgatggtaaaagtactattcagtttgcattttgccccctctactcaaaaaaatgggtaaatgagtccctacatgttagatcaaaaagcaaactagcctttctgttaaaaattttatccatttttactgttaaaaactggtctttttgctctttaatttaatgtacagaaactaatttacccatttttttagtaaaaggggcaaaatgtaatctgaattctaggacaggggcttctataatacttttacctcattttgtttgtgttaagcagataatggagaacattgagagtcaaatgcaagcagaaatgcaagca

SEQ ID NO: 14683 - DNA, 411 bp, Gossypium hirsutum
ctagaaaacaattagtgaacctgcgcatcttgtagaacctatccttaacaacaatatatcttttcattttttggacaattagagctagctcatccacaggccctttacaagaaacatcatcttcaccagaaagaggtgataaaggagcttcagtggacggtgcttcagtaatcaaaaaattaatcttctctgcaagcttgccagacatatctaagtgtatgagttcgctcaagcctccaatcagtacttcattaaagaagaccttaggaacagcacaagatccagataacttctctagctccaattttctactgggatataaatcaatgttgatctcaacatatctaagtcttttgctgcgcagaaaccacctaacttctctacaatcttggcatcctaaccttgcatata

SEQ ID NO: 14684 - DNA, 365 bp, Gossypium hirsutum
agatcggtatctaagaactatatacagcagccgttgaatagaccgtcgagaaagttccgatcaataagctcggacctcttccctcctactggattgtatgtacaatgggcggacgatggcatttttttacgttttcgatggttcgatacgctttccttttcgtagttagatcatgtaatcggatacatatggttgtgtctcgggcattacgagaggaagcttttcgatgtagatgtataggcgccacaagttctctttcgcgagcgtaaccatgtcgattacatcattgcaactcgttagtacccaaagatctttcgaactcactctctttaaactaccacggcaaaaagggcacgattgcgaac

SEQ ID NO: 14685 - DNA, 566 bp, Gossypium hirsutum
gcatatgtttcatatcaaaagaatttcgatttcttcaaatgaagttcgtgacattttttactagcttatgtatgaaagtactagacaggggctattcagatactgtactaatcatttgcactggaatcttctgcaaatatacatatatacatacatatatatatatgcacttcttttgcacgaacccttattaagaaactaattaataaatcttgcatgccttgatatatgatattgaattctccaatttgacattttccttaaatatattcatgcacaacatatattccaatatgatataaaagtataatcactgaatatataaaagaaattctattggagaatatttggatttttttttttaaattctactctaagtatagattttagctaatatatattactgaactgaagtgattcagaatccatatgtatatatacatctaaaatattgcattgagtatagtttagaaataacggtttcttagtgccataatttggatactcgtatattcttgaaagttttgtcaaattcaagtgccatccaaaatatttgagaaaaaaaa

SEQ ID NO: 14686 - DNA, 591 bp, Gossypium hirsutum
  misc_feature (58)..(60): n is a, c, g, or t
  misc_feature (63)..(63): n is a, c, g, or t
tctgagatggctgaatttgatcataaggtgtagttgctttctctattcacttctgtannnctntattttacagtaaactgcatgagaagcttgtcggtgagtgtaaatttgttttagttaataatgaggtgcacactgctaaacttagcatattgaggaaatgccagttctaattcacctttggtaaagctgcaaatactggtgctgtgttgatttccatttatagaactctcttttgatagaacctgtaccatcagaaacctgtgtttgtatggggagaaaagccctcctaaggattttgaactctctacaatatggatggttcctttagtggagcatggagcttattttccactattctgtgtgtcatgtcatttgttggatgggatattctaaatgtaaatttatgacagttgggttcttttgatggttatatccttgcatatcaatgatgctgctgcattttgttcttgatgttgaaaagatgtaatcgggttcatgtaaagttattattgatggtatgaaggtggcttccttaattaagaatggattcccactggtcccttggaatggcccccctcctaatttccc

SEQ ID NO: 14687 - DNA, 771 bp, Gossypium hirsutum
  misc_feature (653)..(675): n is a, c, g, or t
  misc_feature (677)..(684): n is a, c, g, or t
  misc_feature (686)..(735): n is a, c, g, or t
  misc_feature (737)..(760): n is a, c, g, or t
  misc_feature (762)..(762): n is a, c, g, or t
  misc_feature (764)..(764): n is a, c, g, or t
acatccgttgtttcaactctaccacaaccaccacaactcattgttacctgggacggtgatgacattgatgaatctggtcaggatcaatccttggttttcttgaatgtcttggcaggttgtattcaccctaataccttttgagtcgtagggaacatttctggtcatcaggttcaaattctcatcgacggcggtaatacgcataattctatcttcagtctcgcgtggctaagcatttgagactttcgattacatctacttctaattttagagtcatggtaggcaatagtcaaaaactgtagaatggggggtgtatcaaggatcttcgtttacgtgttcaagggactgaaattgtgatagacttttatgtgattcccttggaaggtaccaaattggttcttggggtcgcgtcgctagttactttgggtttaataataatggatttctccaaattatcgtttcaatttcgacaaggcaccatcgacattcattggttgggtgagtctagttcagttccttaacaggttcatatgcagtctctttgtcggatggctgacgcaaacgtcattgccacgtgttatctgttgcatcttcaacaaacaccattggttgagccttcggttgagtcgactgacatggtagctctcttggaaacnnnnnnnnnnnnnnnnnnnnnnnannnnnnnngnnnnnnnnnnnnnnnnnnnnnnnnnnnnnnnnnnnnnnnnnnnnnnnnnnannnnnnnnnnnnnnnnnnnnnnnntntntcacgct

SEQ ID NO: 14688 - DNA, 631 bp, Gossypium hirsutum
tcgagtatcagtatcctggtgtaaaaccacaagcatggaaccatggtcaagtaccaaagaaaagtaactaacggatacataaatattgaagtttttgtgttataatgcaaggttgcattcagttttttttgtcatatgtttgacctacaggtaagaaagaatgttgaaaacataagaaacttccataaactggcagaaagttgtgaacaaatataggcaatgactattaatacatagtaacagaaaccctttatgttcgagaggcataaagcaacaatcaacaaatactttgcccattataaagacatattggactatttctttatttaatttagaactcaagtttggccatgtcacgttctgatatacttctttcgttcagtaaaaagggatattgttttgattaaaacaatcagattcatagatcatttgaagatatagacgtacgtgtattttcggcatcctttgaaaaaccttaagcttctctcacgtaacaactcggcgctttcctccatgcattgtatctgtctcaccaaataaaatttataaattatctatacatggtccataaataactaaacagatatactatctcataaagctctagcattagagtccatcagacaaatag

SEQ ID NO: 14689 - DNA, 472 bp, Gossypium hirsutum
  misc_feature (411)..(411): n is a, c, g, or t
  misc_feature (414)..(416): n is a, c, g, or t
  misc_feature (447)..(448): n is a, c, g, or t
  misc_feature (464)..(467): n is a, c, g, or t
ctgaggatagttcaagagcttttgttaaagacgtcaagcgtatcgtcattaaggtttgtttcttttctctctcgctttcattcttttctgttcctaacattgtttaagttttgacttttgattagcttaatgagataaagaaatgaattaattttaaagttttctttcttcttctttgttgtagttctctttttagtgggtttatgttggtttttgaatttggggggagggggtgtttgggtaccaggaaagatgtggaattgcaaagaaaaatggatgccttgattgttttcttcttactctttatgcgtcttttgtaactaagaaaatgtgggtttttttagtatctaaaacatgcgttcttttacgaaaaaaaagagataggaacacttaaaatagataaaatgaagnatnnntttacaaggcattttccaatgctttctcctnnattgtgctaaaagtannnnatata

SEQ ID NO: 14690 - DNA, 330 bp, Gossypium hirsutum
ttccaaccaaactcaaatcatacactctaaacctatgttcacttggactcgggtatgagtttcaaatacaggcatgtgtttgaacagatatattcaaatttttttcatgtacctagaaggatttttgaaaaatcatatcaccgtacacatgttcggatattgagtctaaaactggtacttaaagcaaaaccaagaatcagagaaacttagctctacttttgtagacacctctaaggctatatccctatgaaaggagggaaatgaagctaaaaaaatggacctaatttcagaaaacaactagtaagataaaaagagaaaaagacatccgtc

SEQ ID NO: 14691 - DNA, 652 bp, Gossypium hirsutum
gaaagcatccatatgaagccattagcattataacaagacattttcaaagtgaatctgttagcatcaagcctgagatttgttggtagtgcctgcctttccattagccattgagcattgtagaactgaaatagaagaaatgaaagagtgaacttgaaagcagctacatgaaccatatagcatataacaatacattttaaagttaatctgttagcatcatgcttgagatttcttcgtttggcctgcttttccattagtcattgagattctagaactgaaatacaagtaatgaaacgttgaactcagaaggcagccatatgaaccaaatagcgtataacataacattttcagactgagtccattagcatcatgcctaagattatttggttgtgcttgtctttctgctttcattagtcgtcaaacattgtataactgaaatagaagcgatgaaacattgaatttaaaagtagccatatgaacccaatagcatataacataacaggacattttcaaaatgaatctgttagcatcatgcctaagatttgttggtagacctgcttttccatttccattagtactgtgttttggggctgtaataggttcattttatctactattgtgtaggcaacgtgaccacttactcatcatctgcaaa

SEQ ID NO: 14692 - DNA, 677 bp, Gossypium hirsutum
  misc_feature (65)..(65): n is a, c, g, or t
  misc_feature (67)..(67): n is a, c, g, or t
  misc_feature (662)..(666): n is a, c, g, or t
  misc_feature (670)..(674): n is a, c, g, or t
attctcgtgtctttatcctcttcattattatgtatatgacactttgaattggctcaatcccccananggagggcatgtgactaatctattttcttttcgagtaatgtgtgactttcaggttcttgggagcaaccatgccaattccatcaactaaagggttgataacgatgcaaaatttttctcgagcaaatggcccaatttgaggacaaatcttcttcaagagggagggtatgattcgaccccgaccgcatcatgtaatggcaccactaaatgccatcgagattggcctaaacacgagggccccaactacaatatgaagctcattttcaactcaatcaaacttatttccctgtggttcagctcactcgagctcaattcagctcatttgagctcaagttagctcacacgagctcaattcagctcattgagctcgttattagctctttagtttatttacttttgattgctggataaattaagtattaagttaattagttaatttagttacaactcttaattacttgtcaacttattacatgttttaattatgttttaattaattatgagtgtttaatatgtcttaaattattacaagaattaataggtttagccaaatttattgtgcaggttatttgtttcacatgcacaataaatttggatannnnnattnnnnnttg

SEQ ID NO: 14693 - DNA, 547 bp, Gossypium hirsutum
atatttcaacatgcacgctcacagttaaaacattgcccattatttcacttgtatatcaattttttatctcaataatccaaaaataaaaataaaaaaaattcaaaatataccatcctactgaaatagatcgcttactacagtatttttcgatatagcttgatacattggggacattggattataatataattaattattatatttatcatagttattttagtttagctaataaattgtgtgatttttaactatgagttcatggactctcacagacaacattatttttaacacaacattattttgtcaaaataataattaagtaaaaacttaccttttggagaaaaaaataaaatactgtcagtgaaaattaaactcacaattacataattaaaaattacactctaccacctaaattaattatagctatttcgaaatataatcattaattatattttaatttggcgccatcaacgtgtctaacaataccaataaaaaattgttttttctaaaacccatgtgatgccatcaaccagttaagcaacatcta

SEQ ID NO: 14694 - DNA, 570 bp, Gossypium hirsutum
  misc_feature (508)..(508): n is a, c, g, or t
tcattatgaaaagagaggcttttaggcactaataacgtaatgttacaagatattgttattataaacttatttgcatatgatatattttctaatttaatttaatttaaataaatttatttaaaaaattaaaagtaactaactaattaaaaggaaaaaaattattgaaatctttgtgggatttactggaaaatcataagcgtgggcttttttctgttttaaaaatatttaaaaataaaaatatgaaaattaaaaaataataattttttattaaaattgttttgtaaaactgaaaataatagtttttagctttaaattaattaaatgtaaaaaaaattattttgcttatcatgttttttttttatattgatatgtttttattattaaaaaattatttctatttatttaattcatatatatcaagtgataaaatctaattaatgaaaaaaaacacacaaaaaagaggaacacaaagaagcaatgacaaaattcccttgcaaataaacattanaagagaaatacaagcttatctatggtccatactttaaaagaaaaaacgaaattgaagcacat

SEQ ID NO: 14695 - DNA, 466 bp, Gossypium hirsutum
ggtttcgatgtctcatccattgactcaggacaaagtagggaaacatggttagtaactttatttgttaataatggtggaagaacaatgtaaatggttagctattattttctgggcagtatggccgcatagaaataagatttattatcagggtgaaaggcaaagtgtatttggccttgtttccaccaactagcaatgttgaaacagcaatagcaaccaatattatgcagaatgataatgcatggaatccaccaacgatgaatgtggttaaagataactttgctgcttcgtttaataggcaagactatatagctcggtggcagggataatttttggagatagtgaggggcatatattggcagcatgtacgtacccaaataattttgtggccaacccaactacgacagaagcgagagcctgtttgcaagcggtggcagtagctgaggaattgggctttcgaagattagtg

SEQ ID NO: 14696 - DNA, 623 bp, Gossypium hirsutum
ttttcattttaactttttaaattttaaattaatagaaaataaattttactttgacctcttaaaattataaaaaattaatttaatcttttaaaaataaaaaagatataaattattcaaatgacgaaattacatttttactatcgtaaaaattacaatttaattttagctcttacaaattttttctaacttcaccactactgtaaaatattttaattactaaatatataaaaacaacttgttaaaaaaaaaagggcaaatagcactaattcgttgctattttgggttatctattaaaaaaaattacagcttaattttgtctgtttcttaagggcatctttaaataaagatcccctttttcaaaaataatgatgttatattgcttagcatgaactctcttcagggggggattgcaatttatatcgaaggatggtattgcaaaactataactaatatattatttgaaaaatttattcaacttaattctttaatttgataaactattaacaaactatattacttctactaactttgaatgtaaaaatttcctatgtgattttattttctacaaaaaaaaatctagtttttcataaaaaaaaaacactctcccttcaaaataaatgagg

SEQ ID NO: 14697 - DNA, 664 bp, Gossypium hirsutum
ccttgatggcttgtagttctgagttttaataaaaaatatgccccccttatctaattaaaacaatgcttaagaaatacattaattactatatttcattggttgtcattgttgaattgaatgattaagccaaatacagtttgacgatttctttgatgataataatgtgaaagtaacctcgccaaccgtgtggaatgatgccccaaaccatccctcacttctattcaatacgcgatgaaaataattttttacccttttcaatttttataatcataaattcataattccttatactgaaaatctcgtttcatccaccatctataatttatgttaaattcttttttaataattttagttatcagtcagttagaatctttattagtttttatatttttccaacttaaatttattatgttaaattcttttatttttaaaattttacaccataaatatattataatatatgtaatgtgatatcaacttattatttttatacaaaactctcaaaaaattcatattattttaattaatggatttaacactcgctttttgagttaggactaaaattttaatattgagaagatgtgttaaaaataatgaaaatatagaagataaactaaatttacaacttatatttttttaggtaaaaaagagacagcactagacg

SEQ ID NO: 14698 - DNA, 555 bp, Gossypium hirsutum
ccttttttccatgaagagcaaatgaaagttgtgttattgtttatgagaatgcatgaaagtgatctagagttgagtcgagttttctttactatctttttagatcaatcttgtacattttataccatttgtcatatagaactttgggttaacttcgtttggcccgcaaaattgatgttatatgtcacgttaaacattctaaaaaagtaaatggtaaattggattagtggtcatccaattatgattttttttttaatcacccaactataaaaaattacaaaatggttagtcaattactattaaatttttttctttttttttgtcattaaaatatgaaaagtgacaaaatgatctccattatcactttaaccgattggtgactaaaaaaacatttgaataattagatgactattttgtaaaattttcatagttgggtgacacatcctatttgatatttaaaaatatatatataacgaccttgaatacatggtattagagccgcctatgattgcaattccacattgagtgcccataggttggatcaataggtactccaaa

SEQ ID NO: 14699 - DNA, 707 bp, Gossypium hirsutum
  misc_feature (58)..(63): n is a, c, g, or t
  misc_feature (473)..(473): n is a, c, g, or t
  misc_feature (538)..(538): n is a, c, g, or t
  misc_feature (639)..(651): n is a, c, g, or t
  misc_feature (653)..(660): n is a, c, g, or t
  misc_feature (662)..(662): n is a, c, g, or t
  misc_feature (664)..(671): n is a, c, g, or t
  misc_feature (674)..(681): n is a, c, g, or t
  misc_feature (683)..(685): n is a, c, g, or t
  misc_feature (693)..(693): n is a, c, g, or t
  misc_feature (695)..(698): n is a, c, g, or t
atttatctcatttgagtggttatatgttcagattatttattgtactgaagacatgatnnnnnntctctttgggaggccgtgaatacaaggcaacctaatttggaacaagtgaaggttgatttcttaccctctttttttacatccaagtcactttccttcgttcatcatcataagcatgccaatcatgtttaaatgtgatttacaacattacattttgcagattgcaaaatcactgccaaggatctgttttttctctggtcttagtggggaggagatgatgatgttcattgatgctttccctgagactggtatcctacacttttacacctattgaagtcttatgtttccaattcctcccccccccccccaaagtacctctgttcaaaaaatatattcgaaaaaaattaggggggaataaccccccaaatgttaaaaaaaaaaaaaaaaaattaaaaatggggaaaaaaaaaagngaatccaacacccccctcgagtctaaaaaaaataatttacagttaaattctatattacccggccncttttttggattgaaaaaaaaaaataattccccaaatattggaaaaaatttgaaaaaaattgagcatgtcaggattccggaccaaaattttcaaaattggnnnnnnnnnnnnncnnnnnnnncncnnnnnnnntcnnnnnnnntnnntccccctntnnnnccctctctt

SEQ ID NO: 14700 - DNA, 577 bp, Gossypium hirsutum
atttaggaaatgctgaagagaggttaaagttagcagagtgaaattgatgaattctgttaaagtggtccttgtgttggtcttcggtcttctatatgctttcacacttctctttcgggtaagagaattttgaggtaaaaacaataatgatggtgtttaatgcaaatattgttgttattttaagggtaaaatatgctataactccataagggatgaagctataatagaaaattattttagaggtcaaagataaatcataaattattagagggtcgaagtgtaattttatcattatactaatatataatttcataaaaatctaaaggactaaagcaaatttaccatttggggagggaggcaaggccattacctacctctttgtttttggtccctaaagtccatgtactcttcacaaatttagagtttagtccatatatttttattttctggaatttaatctttttactttttagattttaaatttcaaattcaactactaataacactcttaaaactattttgtcaaatttatgttcattatcatattgttttatagttgcatggttatcaagtgaagaaa

SEQ ID NO: 14701 - DNA, 532 bp, Gossypium hirsutum
acttttaagattgtgggctgttacaattaaccttttaagatcatgggctgtgatgcaaccttgaacatatgggtctttcaggtttgcttttgttttaacttgggcccttaagcaaagtgaagttatcaatgaagggaagtaagcacttcctgtcttctttctagcacagttatggatctccttaacaataatcttctcaacattgataaacctttttgtcataattgcatacaacaaaagtattcactccatcgtgatggtggaaatatgtgagataggcatgaaactatatcgaacaaagtagaaccataccttagccactagttttagataatccctttagcaagaatgactaccatactttcttataatccattgggatcccaggtttgtcacaacattaagcacttgttgaagaaaatcccaatttatatttgtcatcatggcaaagtactcatcttcttcaacatcaagtaggttaaacaaatcattaatagatttagaagttatgggtaccttcttcttgtgaaca

SEQ ID NO: 14702 - DNA, 515 bp, Gossypium hirsutum
attacaccttgggaaaccttctaaccataagattacttagtaaattactggcttacattacctaatttggtttatatgaataaaatgtaagattttattgttctgttgatatgataatttatatgaattaaaaatatattttactaaattatgcttattataaaatttgctttgtttttttaacatttaaacaaataaattgcaacaattttagtcaaaatagacttacatatgctagatggaagtttagttatcttttttgagtgaattatagctacatacatgattgtaaatacgttagaaatcaaaattagatttcaccagcacttgaaatatctgagtaggacattaaattagagttttatttcattttgataaataaataaataattcttattcaatttaaataaaaatagttcattaatttcttatagtttagaaatgtttaaattctcaggaatgataggaaaaacaaaaaaaaattaaaaaaaatgggctagagaataaggtgtaat

SEQ ID NO: 14703 - DNA, 646 bp, Gossypium hirsutum
tcctaggagaaggttatggctaagaaaaatgttttgggaatagttttggaaattgagttgagaaggtatatctccactaatgatgttatggcttagatcaagctcatatagagataagccactaatttgcaggggaatccttccactcaagttattgtttgccaaaattaaggatcttaaatttgacaaattaccaatctgagatggaatgggcccactcaatttgttgtctgagagattcaagtatttcagggcattcaaactctcaatttcatggggtatgggaccctccaaatgattggaagcgatggttaaatccattaaattgggtaaatgaagtagtgatgaagggattgagccagtgagtttgttataagagagatacaatacagtcagattctttaattttccaatatctaatgggatgaaaccttcaaaaagatttgagtcaaggtacaagctactcaagctgggtaaaagacctagaaacgaagggatttcaccactcaagttattggcaccaagatccaagtaagtcaacctcttaagatttcttatttctaatgggatggaaccatttattttatttgtataaagagagaacgactccagtctggataacttacccaaagaggaagggatggga

SEQ ID NO: 14704 - DNA, 669 bp, Gossypium hirsutum
aaaaggccttttctttcctatcccatgttatagtaataattctattaaactgcggaatgaataaggacaaaatatcttatattaaaggtaaatgtgttatggagttacttatattaagatttatattttattttgttctttctattaaaaaaataataaattaatccttatacattagattaaaaagtaaattaatcattctgttaaaagtctatttattttcactgttaattcatatacattagtatgaggtatatgtagcatgtttagttatctcatcaagcacactaaattttaacaataaaaataaataaaatttttaatcgaaatgactaattcactctttaatctaacgtagcgtgactaatttacttatttctaaatacgtaaaatacattcttacttttaatataaaaacttccataatacttttacctatattacattttaaatcaacatcaatatcgaatttcaatagtttgaaaaatctattaatctttctctctctctctctctctctctctccatatcctctatcagccttcccttttttattttctttccaaacatagcctcttcaattttttcaagaagaaaaaggcaagatcaacaccaatttatttgcaaaagaatatatacatacacgcatacatatagcttctttgagat

SEQ ID NO: 14705 - DNA, 491 bp, Gossypium hirsutum
gtttcataagagactaagggttgaagggggctcccaaagtatcaaggagagtaatggcagtagactggttcgccgtgggcaaggcaagaaaccagttggttccaagagggagtttattccatttctcctactttctcatctcgaggctcaaacaaagtctgtcagtccaatggacttgactccccttgcgcaaggtccacctgacgagtccgctcatcagactaccctttttgcatttccatttatccctactagcccaaggcaacatccctcttcttttggtagggcatcccaactattcccattgagggacctctttattacgggtcagtatcccttctccccaataaaaattagccaatggtgggaaaaagggtctaccctaagagctgaaagaatgtgctcaccccctcctcctctgaaactcacaaaccatctctcttggaattaatagactcctaccagatcgtggtgaatctctctttctcccc

SEQ ID NO: 14706 - DNA, 705 bp, Gossypium hirsutum
ttccgatcttccattgacaactcagtgtaacttcagactacaacataatcaagcatggatcttttgccatgaattactctcaaactatttcatgaatttttaaagctgtagtaccatttatcagcatactattttgtgttgcctttatgattttaaacatggtttagaaattacaatttgtctaccatggttgactaatttcttttcttcacaactttctgttctgttctatttctcgacattatatgttcatcaaggagattgattaaaatttctttttctctctacgtatttagttgacagaggaggcatgcttcattttgtctaaagattttaaaaactctctagttttccatgagaaggacctggatatagcaatgcttaacaaaggtatgtttattattcagatgaaacagcaaatctattcactttgatgtagacgtttttacactaaggatctttcatcaggattgaagttattgcttctgtttctattacattttagaacaaccaaaacatttcttcttatacaaattttacaccatttaaactacaaacttcttagtataattagcgagcttcgagcttcttaatttgcacattgacgcaatcatttgagcttattttgcacatttgaaaagcaagcatttgagggataacttttgaatttgggcttgttaatgtgagctttaacttctgatttgc

SEQ ID NO: 14707 - DNA, 516 bp, Gossypium hirsutum
ggagttctttttggttagctgagccaaatttagacaactaagatttcacggcacatatgactgtggttccccctccatgtgccaaaacattcaatcatttcctagatggctattttgaatagattgccaatataggataagttgttctctcatggggttatttctgaaaggaattacctactatgctcctctggtcttgaatctcggagccatatcttaagggcaagtcccttatctcacaccttcttaagttggcttggaatgtttatatgcattccatctagcgcaaaaaaaaatgatagactatttagtagaactgcaacttttatggatcatctgttagcaaaaattcaaattcaagtttcctgcttcttgaataaaatacaaatacttatccaaaaaaaatttattaattttcaattaaatttaattaaatttatcaatatttatttataaataattgattacatagtcattttactcattaataaattagcatgttgtgataaattaacc

SEQ ID NO: 14708 - DNA, 654 bp, Gossypium hirsutum
atgtttgataggatttaagtgcctgaaaccgtcttaggttttaccttcggcctcctctttactccaaaaatattattaacaagattctcttcctgtcaaattctgctattacatagtatacttcacataatttataaatttaacatttaatttttatactttttgaattgatcaattttagatcttgtatttttcaattttttgtcctgaccgaacaatatatttaaatttacttggttaaattttgctattaagtatcatatataaatttatagatttaatccatattctttagatcattcttagtccttatattttttgaatttcaaaatttcgaaatttcaatcttaatgcaaacacaatcaataaatctattaattaaaatttattctaagtagtatataaaaatagcaaactaacacatgtgataatatgtttgctttatcaaattttgaaaataatagaacttaatgaatttaacaactttctttcgattaaaactaaaattctaaaactccgaaaattaccaaattaaaaaattaccaaattaaagttcaatactaaatccacaacttacaacataaataacaagatttgacctaacctattattactcccatagtctcttcttttctgctacaccattctctccca

SEQ ID NO: 14709 - DNA, 498 bp, Gossypium hirsutum
ccatctaaagatcactaaccctgttcacgctaggtgtaatcatatttgagtccaagctactaccattgagaccttcaatacccaatttatcatccctaatattaatgctcttaccatcaccaacttgccaaccaaagccatatttaagaatcacagtagcagcagcaatgctcgaccatgtataagacgttcttttgactcttttgggtttgaaaatatttccatcaggaaaatatttggatgacaacattttgaagcaaagagtttttttgttgttgatgagtcttcaaacttgacgccctaaaagagagatattgaataaccttatgttccgaatgcctatccctcacatacctttcggctgacaaagaaatctctaaggaagcatagaccagaattttcttttttccttactagaccaccatgtacagctaagttttgtttgaatgtcctttgacaccccctttggggcaaggaagatagagagcgcataagtgg

SEQ ID NO: 14710 - DNA, 405 bp, Gossypium hirsutum
gcattcttggtcttatatgcgtcattttgcttaatgttttaaagataactgttattatgttcctatgataataattgcaaccttattgcatctgtttgttcgatttacatttcaccggccatgcctagatcagagtataaactattattctcttatatgctgagactgaaagcattatacctgagatagaatgatcttagaccccctttctgcctctgtatgaatagttgttttctattacacgacatgtaaacaatctcatcctaggagctttaccaggttctgaaaaccttaaataatgcattgtcagtggataatacaaattttcaagtgtcaaaggtgagggataaagctgttttacactatcagaaaatacatgaaatatctgttcttatgttaagtagt

SEQ ID NO: 14711 - DNA, 508 bp, Gossypium hirsutum
cttcttcctactgatgacagtgttgaggtagctgttggttttgttactgaatgtggttccttacttcaggatctttcaccaaaaggcctacatggttagtgttaccatttgaatcatgtttttccaatgcagtacttatacccatattactacgattgatactggtttaagttccatagtattatggtgttggaatgctgagatgtatgtattgtcttgcattttgttaattagacatgtaatgcatgacaaatcatttttccttggggatgtgcttttttcttgcttcagcttttggaatatactaagaacttcatttggttgacatccttaagtgtggttacaatgctggtaagtagtatgagttaggttttgaaaaagtcactgtatactggttttaaaaatatttcatcctcaatcgtgaaaaacgatatctgtgattctgattcttttgtttcttttttaatttttcataagcttacttattttgcattgaccgctgcaggaa

SEQ ID NO: 14712 - DNA, 461 bp, Gossypium hirsutum
caatattcacaaacttccacaagttataagcttgcaggaaggtcttcatcttaacaacccatatttgatagttttcaccattgaaaacgaatggtgaaggttgtaaaaagcttccggaagccatgtataacacagaaaaataacaacgtcccttaagaaggtagctccgataccaaatgttaaaatttcgagaataaaaaagaaagaattgaagagaagaaacatgaattttagcaaaaaattatctgctaaagttttatatatttcactcaatcaaatttgaacaatgcaacaagcgtatttataacaaaaaaactcctaaatatgaaaagaaataacaattgttttatactaataaatataaaaaataatatgctcataaatactaaatattctaaaaaaactggaaaacataatctgaaaacataacatgcacgtaagttcttcacaactccataaaa

SEQ ID NO: 14713 - DNA, 669 bp, Gossypium hirsutum
  misc_feature (117)..(117): n is a, c, g, or t
tcactgagttaacagcgtcttcgtgtgcatgaaccgattcgagacatttggaatctgaaattctccaaactttgaatgtccggtcccatgaagccgaataaagaagaccgtgttcgntgttcaagctcaaacacgacagcgcatccgagtgtttgatccataaagaacgcttacgtttcacttcgatgtagctgcttggtttaatggagcttttaaggatgtctttaagagttggcaaggatgcagatcgtttatgaatgctggggttcttaagcgacactttccaaacacgaatcttcccatcttgatgacccgtaaaaatcttttcaccagatataacaatggccttaaccaatccactgtttgacttaaaccctgtaaattctttcaaattcttccacacacgaatgttcttgctatcagagccagtgtaaagaagatcctttgttgctgccaatgaataaatatgcccttcttcacgtacaatggagccgatgagactattagccggaacgttggcttcgtcggaatgggtccatggcgttttgctcaaaggagaagcttgcttccaaggcgacatagtcaaaggtgaagcgtcgcaactcaccctgttgacttcataacaagcgggggcggccgatgcgctgctgtatcggatgttgaaatcat

SEQ ID NO: 14714 - DNA, 501 bp, Gossypium hirsutum
ctccttccttaagaagcaattgtcatcatcaatatttgtggggtaatggttgtttatctatttttctttaattacatatttgggattttaattttgtttacgaaaataaaatatgctttataatcaatcatttaattttatgataaaattaattattattacaatatcttaacttcaatagaaggaaatttgacattgtccatatattaataattttaatgtaagttttgattaaatttgttcttgttaacattatatctaagttattcataacctcttttaactcataaataagaaaataatatataccaatatactctaatttatatcttgataataatattaatatcaaattagagcttaaatgtattaagcaacgtaggagcagcggatgaaagaaaaggtgactcctagagtcccatccaaaggccaaaagcaccataggcttgctttttcagcttttcatgacatagtttttctacggaagtttctctcacatgc

SEQ ID NO: 14715 - DNA, 716 bp, Gossypium hirsutum
  misc_feature (621)..(625): n is a, c, g, or t
  misc_feature (627)..(629): n is a, c, g, or t
  misc_feature (633)..(640): n is a, c, g, or t
  misc_feature (643)..(656): n is a, c, g, or t
  misc_feature (659)..(671): n is a, c, g, or t
  misc_feature (676)..(676): n is a, c, g, or t
  misc_feature (678)..(679): n is a, c, g, or t
  misc_feature (681)..(690): n is a, c, g, or t
  misc_feature (692)..(693): n is a, c, g, or t
  misc_feature (697)..(704): n is a, c, g, or t
ccgaacatgagttccatctaatgctccaatacaatctttaaaataaggataaaaccttggattgtttctgatttcactaggagttgactcatcaggtaatctaataactagtttatacaatttcaaaatagctctcaatacaaccctaaagtaacggtgaattgtctcagttgatctataatatctagatccaatcactcgaaaccttacattatgaccaattatatgtaaaaatataactacttgctccctaatattcacagatttagatgattgtaacaaattattcctactaagaatatcacacaaattaaaaaaggcgatcggtctcatccttatcacatcaatacaatgctggtcacaaaatttccattaaattatcttcaattttttgtattatctcccaagtttattttcaatttcatgtctcatgcttcatttaggattcttccaacgcttactgcctaattaccataatcaaaactctcttttattttggagtcttttaagtatgctgcactaagaagataactattccatttatattccacatttttattatttataagataactataaggataaccataaatataaattcaaaaactaccaactatacannnnncnnnttgnnnnnnnnctnnnnnnnnnnnnnnttnnnnnnnnnnnnntttcncnncnnnnnnnnnntnntttnnnnnnnntttcttttactc

SEQ ID NO: 14716 - DNA, 367 bp, Gossypium hirsutum
gtaaattgcaatgttttaatgtgaaatgatgaataaatgtatgttaatgtctcactaagttcttctaaacttattatggatgccttcgactgtaggatctattagaagataagagacgagagacaatgtcaaggttatgccataggagcaatgattcatgctgatatacatacgaagaagaggaatattgtgtcggagttatggtccacgctaaggggagattttaacactgtcatacaactagttagaagtaatgttaacccacgagtttatacgagattccttatagcaaagtttaagtctgtgtgtaattatagtactctgattatgtatttagtaaaagcaagatggattcaatgaacttcga

SEQ ID NO: 14717 - DNA, 663 bp, Gossypium hirsutum
tatcggtgttgctatgagaagttgacatgatattagaggcttttttgtgatttaatagaatatttgaaacaagtatgagacaggcatgcaatccattcatcagttatttttggaggaattatgtctttggagaaaggtattaagatgaatacatgacacccatctctgattatcaaatacttctgtctaacaggtatgggtttagcaaagaaattgttgagtgccctggtaactcctaagtttctgtacttcttgtttcagactccttttgtggaacatttggcagtgtttcatagttttttgaattttgttggagtgccttttatgatgaggttttctggtaactggttgatcctgcaaacctctgtaaaaattcacctttttttctgtttcattccttcttcttcatatttggattgcttatgatatcaatgtgttaacagattattggccatcaaatattcgggtttgtggcttctggttcctccctattgagtggcagttttcctgtcaggaatgtggacaaatttcaacactgctttccacacggcatctaaactcggatgacatgtgtccagctcatgctgagttacagtattttctaaggactcctttgtctaggccacctattttcatagggctaagttctattggaaggtagga

SEQ ID NO: 14718 - DNA, 622 bp, Gossypium hirsutum
  misc_feature (571)..(572): n is a, c, g, or t
  misc_feature (601)..(604): n is a, c, g, or t
  misc_feature (612)..(618): n is a, c, g, or t
catgaaagatgaaaaaccaattataattgaggtgtggctttttttattgctgattactttctttctgccaacatcctactcattctccatccatgtgactttgtgcatatgcttctttctttcttttatcttttgtggtcaatgctgatgtcatttcaccttaatgtgctcaagaattaacactttgatatgttcatgcctatagagtacactatgttttgattttttgtggttcatattaattatttttttgaattgattcatctactttaattagatactttggtgctatcttgaaaataaaaccaaacagttccataaaaatacattatcttgaagtatatttttggtattgtagcaattgggcatgaaagggtgtcgcacagcttgcatattcaaataagcgcagagtctagctagccatgatgttactattaatgtttctattaatgtccttaatcactgatgttattttgtgataacttttagtgtgctatgtttgcttgtaatcatgtatatgtgtggatacacatactgtccgatataggtatatatatttcttttttttttnnaatttccccaggggtggggaaagttattnnnnacggtatnnnnnnnaaaa

SEQ ID NO: 14719 - DNA, 572 bp, Gossypium hirsutum
  misc_feature (519)..(520): n is a, c, g, or t
  misc_feature (522)..(524): n is a, c, g, or t
  misc_feature (562)..(562): n is a, c, g, or t
agtttcttgagactacaaccatcgagcgtttccagcgtgtggtgaagcgatttgttgatcaggtaccgacttttaggagcttcagagttgttttttgttgaaccagatccgccttgtaagtgttgagctaaataggaattaagaaagtaccctcaaacctatcctccctgaaataaaataaaaaatgaaaccttttaaatcatgctatgatgattttggctcacctatggcatattaaacaatataattgacaagtaagattttcttatgttgtttgccaatggaggaatttattattatttaaaaaaagaaaagaaaaaggaagaagcaaaagctgtactgaccttgaaaaaagaaaaattaagtgaaaataggaaaaggatcataaatctttatatatctttcgggtgtattttaggtggagcagaacattgaatttatgcaaaggaagagagatgaggtggcattttcaccaaaagatcatcaaactgttgattcatttctgcaggtttccattcnnannngtacctaggttttctagaattgtaataaagggaatttnctgaacttca

SEQ ID NO: 14720 - DNA, 623 bp, Gossypium hirsutum
acttgcctattatattctctcaagaaacaagaacaccaaccaaaccgtcataaatctcaaaggaatcgctgtaagttcactgcaaaatccaccattctagtacgtctgcttaaagctgagaattgttatggatattgtagattggaaatgcttggatagatgatgccatttgtatgaagggaatgttcgattatttatggacacacgctctcaactcagatgaaaccaatgaaggaattaataagtattgcaactttgttagtgaagattcagttagcaagaaaggagatggagatgacaatacgattcaatgtggaaagtatctaagtcagggatttagagagatgggattcattgatttatatgatatttatgcccctcaatgcaatttatcggcaataaaacctggctcaaatggtaatgtaagtatcatactcttaaatggtcatgcatgcttcatactgttttactgattaagacaatagtaattaaaacttataacacacttctcttattgattcaaacttgaatttatatgatatcttgaattgttagatcatgaactttgatccctgctctggctttcacgtcaaatcgtacctaaatcttcccaaggtacaagc

SEQ ID NO: 14721 - DNA, 415 bp, Gossypium hirsutum
  misc_feature (61)..(64): n is a, c, g, or t
caatgcacttgacagaaatattattacaatatatcataattttgaagtatcccctttgaannnnattggtgacaaattaataaaatatttaattttctattttgagaatatattgaatcaaagaaagaagtcatgaaagtcgtactcattccaaccaacacacttgataaacagagtaggattttgcatatgatgcttacatccaactagttaaagaaggaaagaagcgataagaggccatgctcgaaaatgcaaaatcaaatatcaactatgaacaactcgtgtgaaacaaaaaataataacataaactccaacaataccacttgtttcaactattctaatatagcaccttgtgagttctatactttacatgataaaaatacaaaaatacccttaattgcgaaggaataagatg

SEQ ID NO: 14722 - DNA, 685 bp, Gossypium hirsutum
gctagttctccattgttgttgtggttgaaaagtgttttttagaaaaaaaaatttaaaaagtgtaatagaaaagcattgtgaaaaagtgtgattttttaatttttaacgttcttcatcattgtcaaaaattgtggttgaaggttaaaatgtccttttagacgtgatagtgtaaagttaaaaattagttaaattatatgatatttaaataatttaatataacagtacatgaagtataacttttaaatacttttttaaaggatttttaagtaactaatataaattgtttgtaaaattaatgttacataaaaatataaattaatctaacttttcatatatttttaaatagttcatataaataacgatattttgatagttttcgcttccaaatgcaaaaactaaaaatacctatattccaacttttgcgtttgagtggaaaagtaatttttcacttcagttttgaccccgaaagttaagtgttcttcattacttctgaggtgaaaaagtacttttaacttctcaaacataataaaagacactgttaatcatatctataactgttacatagtgttccataccccacttcttttattagggtgagtttggatgggcaattatagtatctaatctcaccactaacgctgtttttacactaaacacaccgtccctcgaaacctatcctttatgt

SEQ ID NO: 14723 - DNA, 638 bp, Gossypium hirsutum
aggagtatgatactattaagggtttccatatatatatatatatacgttttacaacaaatggcgctttaggggatgatggctcgctcgatgttgatgaagatggcgatggaaactgagtacctttcctgaaatcaccgcagaaactctgcatctccttgacatgaacaaacttcattccattactaatcaaatcaaatcaactcttgtctgttctattttactttgaggtgtgtaatataaatgtgcatgcataattgtgaaaggtaatacaagaatatatagaaaagaaatggagatttgcttcctaactgtaattgtatgctagaactaatagtggcatgcacttggtttccacctctgatgcttttatttctcttggtttaaaaatggaaaacgtacctggagagtgaggctggtttggggatcgaggcattgaccttgcagtggaggtctggtgctgagaaaagaaaggttactgcaatgaccacatttcactgtcactgtttcaagcaatcttttgcatgggatcccaacctatcaaaaaccaattcagatcaagaaaatacaagaaaatgggcacaattacggagacataataaacatatatacaaaccccaaaccagcatcttatgagaaca

SEQ ID NO: 14724 - DNA, 609 bp, Gossypium hirsutum
  misc_feature (49)..(49): n is a, c, g, or t
  misc_feature (52)..(52): n is a, c, g, or t
taattttcagttttgattattcaattattatttttcttattttttattnatntctaatttgtttcattatatttctaaatctctatcgatgagtattttattagggatttgatttcctgttagtggatctgatctgttctttctgtacgaggcaaccatattagaatatctttttttttgtcttaattcaagattttatttctgaatcgtaatttaaaagttgctgaaagttttatttggttgttgaaaaaatgcttggggagctaatggaagtattaaattatacgaatgcaataacctgttgctgaaaacaaaatctgttaaatatagctattatgctttttaagtgttttttgggtcacattgatttggactttggtatattaaaatgactgaagtctaggctctaattaatttattgactggtttttgcctttttagcttgaacttgaaactgtttcctttgtgaaggtttgggctttaccaccttgattggtctgttgttatacaggaactcaaagattggattaagggattgctgtatttggggggagtggtaaaatatcgaatccgggttttcagaactgattgatacgggataaaaagaga

SEQ ID NO: 14725 - DNA, 623 bp, Gossypium hirsutum
gtaacattcactcaggatacatggtcaaagggatttgtaggagagaaataactcaatgttccatgccatacaaacacacaagttcataggttaagaataaagtcttaacaaaaaacatattgatactaatttcacaagatacacctaaactaagaacaagtcataatgggaacatgcatgatattagaacatcatttggtgctctcagcatgtccagaaatgcaaggaaataattaaaacacgaatgagcaatgaaatgtgacttacaccagcccactcgccaagagcttttgcactaggtgcacgtagcaccttaacattatggtcagcgcagagtgccttgaccagcttaacataatcaggttggtcacagtcatcggctaaaacacaaagatgtgcattgtgcttttcaattgccttggcagcttcatgtaagccacgagcaagcccaccatgagcttgggacttcctcaccacaagaggcaaggctgtgttgatgtctattggctcaccaagagtagcgggtgcctctggttgggcaacggcaacttcttctctgcaaaagccataggcaagagcacagaataactacatgcagacaacagaataactacatgcagaca

SEQ ID NO: 14726 - DNA, 676 bp, Gossypium hirsutum
caagatcttagtgggttgattgtttttaacatgtaaattttcaaatagcttataattttttgtcaagagcttgtaatacgccctacaactagtattttgaagtttacaataaaaagtgatttctatcgtatctataatgaatcctattgttccaatagggtcggaagcgtgtaaattattgtactaaaaaatcacacaaagttcaatttccagggaagagaggtggatcacaaggatctcttaaataccaagtctttccttagtcagaatatccattttatagtaatttaatagcacaattaaatactactattataccctcaaatattgaaagaaaaataggacaagaaagaacacaagagttttaacgaggttcggtaaattatacctacgtcctcgagcactaacaccagatgataactttactatctccaagatattacaaacaaatagaattccttaagaattctcaaatgagagaagagagaaaactaagagagaaagattggttgggatgaattgaaatgagaaatgagaaatgagaaggcctatttatagttgaggtttaaggaccaaacaataaatagcccattatctcaagaaccaaaagaaaattatcccatgccactttttcaaagtgaactttagggtgctaaacttacaccactttggattg

SEQ ID NO: 14727 - DNA, 601 bp, Gossypium hirsutum
ggtcaagtagcataagttgatttttgattcaaatcattggcgtttgtattgtcggtttccttgtttggcttctaagaaaatatagtaagaaagtaaatttgaaaatggaactctttcttgcattaatcggtctttgttttcttatttccaagattatttttaacgcaatgacatactaaggaatctcgattgacaaagaggaaatgtatggttgatttgtgaattattatttcgcctgtatgtctttggtttttcctaattagtgcggttagcaagcattgtaagagtgtataatatacatataaatctgaggtaagtgggagattactgaactttgaacatatgatagctcagactactctggtattagaaatggttacttccatcttcacctcgctgaaatcattatacttgaaaaaatagaagagaatttgttcatcaaactggttaaagatgggctgaaatgattacaggctacctgatttaggccttgtaagaaacagacaccaatgggcttctcaatgtaaattttgggttgaggttgaagtccataccacaaagaaattattggctttcgatcatattccttgtattggccgag

SEQ ID NO: 14728 - DNA, 448 bp, Gossypium hirsutum
gggttattctcttatgcctctctataatttataaaattttaaattagtgtactttggccttaaaaataaaaaaattaaaaatataactattaaaatagtgaaattgtattttaccatcataaaaatatatagcttatttggttaaattgcaataaatatttttatattatgagtttgattgcattttacatcaaagagcaaacaatcctttttggttgcattttacatcaaagagcaaacaatccttttatgttaaaaatttcattaatttgtactgttaaaaattgatataattaatagaataatcagatagtccatgttgacgtgactaatttttaataatgtaaattgataaaaattttaatagaaaaattaattttatttttgatctaacataagagactattttgcctaaaagaggctaacctctatgtaggagcaaaccaaa

SEQ ID NO: 14729 - DNA, 538 bp, Gossypium hirsutum
  misc_feature (527)..(531): n is a, c, g, or t
ggcatcatcatgggcatcatcattacctaacacatttcttattagctttataagttcctcataggaaataatgtcaatattactgttcagttcataagcaagattaatgggtagtatatgcttacctcggcaagctcaagcatggtaaattctcctggatttccaagattaaaaggtccaatatgttccccttccatcaaccgcatcagaccctccaccttttcagataatgaaaatacagtttagcaaatggcaaatatatttgttatgaaatgcatgccatgataccaaaatattgaagaagaaatatatttgttatgaaatgcatgccatgatatcaaaatattgaagtattatagaaatttttatattaaaattcagattgcattttattttcactaaaaaatctggctctaggaaagtgtccatgtgggactttcatttggtgctactcacatggtgttatgtctattcagttaatttctacactcagcaaaggaaaaattcaggaccagagaatgatcctnnnnntgatcct

SEQ ID NO: 14730 - DNA, 444 bp, Gossypium hirsutum
  misc_feature (41)..(42): n is a, c, g, or t
  misc_feature (429)..(430): n is a, c, g, or t
  misc_feature (438)..(438): n is a, c, g, or t
ctaattagtttcaatgttttgcatatcttaagttgctttanncttgtctgttaatgttgttcggcctgtcaaagctgtcatacgatttcttgtctacatgtctagaacttgagtcatggtttcctgttagattaactattcttcttccatttatgttttgtacttcctatatttattctgtaatgaggtttagtgaccctaatctcatgattgaatggattgatttgatgtttagagattcagacagttaattgcctctttgtcttctgacttactgtttctggattgcatatgatcccttgtcttgttcaggacacctcgtgatctttatttcttctacatacttgccaacactcttgcatcaaaaaaacttgtttatcaaccttttggtagtaattgaatgtaatgtatggttttgactgtttgtgnngttggatnagtctg

SEQ ID NO: 14731 - DNA, 557 bp, Gossypium hirsutum
gagagagtaggatttgcagccattgacacggtagaggtgttgtcgcaccagacgactggagactggcagggaggcatacccagctcatcgagcaactatttaacccacagcaattcagcccatagttagcgagactacggtattcagcctcagaggaggatcgagagataacgggttactttttggagcaccatgtaatgggattcgaccctagatagataacacagccagtggtggaacgccgatcttcaaccgaggaagcccaatcagtatcagaatagtcgactaactcaaactggcctttggagagaaataagccatgatctaaagtacctagaagataccgcaacacccgtttaatagccttccaatgagcttcactgggagcgttcatgtattgactaagcttattaacacagaatgataaatcaggacgagtaatgcacacatattggagcatgccgactatgcttcggtacaaggggctatcagcaaatggcgggctgtcattagaggcaagtaactttggagtgctgaccataggtgtcgacgtagca

SEQ ID NO: 14732 - DNA, 611 bp, Gossypium hirsutum
atactaaccaacaggcaaatgcagcatgattcatgtcaactactaaagaaagcacataaaagtagaacaatcccatttactaatatctaaaatgaatcatctacaagatttgccaattcatagtgtcaactataagttgatgataatccgatgatcaccgactgcaccaatcttaacctcctcctacttctgaccctgacatgatatcaatttactctgctttcttctccttcgggacttgtgaattccaatacagaataatttgactcaggactgcgccatttgttgcaataccaagtacagagcccaaaagaacttcaagggagtcaagggcatcaaatgcatcaaaccaacggtgtcatgcagtttttcataacataccatgtctactgatgagtccacatgccccccaaaaacagaagactaaaatgacctacagttaagttgatcgggtttctatacttaaccgaagattctatacttaaccgaacattttagtcttctgtttttggggggcatgtggactcatcagtagacatggtatgttatgaaaaactgcatgacccgttggtattgatgcatttgatgccttgactccttgaagttctttt

SEQ ID NO: 14733 - DNA, 628 bp, Gossypium hirsutum
agagagagagagagagagactgcagcttttagaatacgaaagaatgagcaaattgttcttaccttgaaaccttggctgtgagcaatttctataatactttttcttgtaatgccaggaagaattgttcctcctagaacaggagtggagatggtattatcctgcaatatatatgtatgtatgtatgtatgtattacggggaattatttaatggcttgatactatagcagaattcataaaactgcaaaattcatggtctaaatgtatgatatgcctatgaaatcaatcatcaagcatccgttaagtcaaaactttgtcatacctttacgaaaaaaacattagcggtagagacctcttcgagatatcgattatgaatggagtcgagatacagaccatcagagaaaccatttgctttagctttagcctgtgccttcataatctatgaaaaagaaaaaagataatagcctcaatatactaaaagacatgaagtcgggttatgcaaataaagtcagattaccccggcgtaattccctatagcttttatgtttccaactcctccaagggttgcacgatgtatatcgttttcgaccaccacattaatcggcttcaaaccaccctgtcatcacgataa

SEQ ID NO: 14734 - DNA, 644 bp, Gossypium hirsutum
ttggtctctgagtgtaagtttatttatatcttctgttggagttgcttttgtttgggcagacaaatttgttgatagggagaacttttaagacgacaacagcaaacagtaagaaattggaatgtccagaaagaaatggaaaaagtaaactcccatgattctaaaatatttgtcctttctgcaaaatgatataaaattaatgaagtaattacttttaaaaaatgaagaagctccatgtgcaacttaaatttgtgtgttctagttcaagttgaagcattttttaacttggtacttctattgggtggatctcttgtaaataaaaaacctcttatttttggtactccgtgttactgtcattatgtcctttattggattcaggaaagcttttagtaaattgttttgtaaagtaaaattagtcagagggcattgttttttggatattttttcgtagatatggttatatgtcgtcgcttaaatcttcctactttttatgagtctctcttcctatgtatagattgattaaatatttaatgtaaaatatctaatgtcattttatgtgctttatttcctttgttgtaaatccagtaaatactggtgtgggacgcacaggaatggattttccggcagtttccataagcttcacttca

SEQ ID NO: 14735 - DNA, 655 bp, Gossypium hirsutum
atttaatgacgacgacgatgatgatgatgatgatgatgatgatgatgatgatgatgatgatgatgatgaatgactgatttacacaaccttcaaaagctcaagttttgaagaaccctgccacccaattggttttggaggatcagtgggatggatccattccactgtatgagaatcacactgtcgcaggcaaaggcttaaacctatcctgttgataaacagcatgtatggctgaagatgaatgacctgaacatcaaccatttttagtagttattcaccaaacagtatatccataaataaacattaactatttttaaagctgtttcaaaatctaaatcaatataaacttacaaatctattataacatcctttatattctaattcaatactagtagaagcacgcttaatagtgatgatttacaaaactataggttactcagataatctacagtaaagaacatagtctgacccagaatttccgggtcagtaaatgccaacacagggataaagtaagtaatacacaaggcaagaactgtttctgagatcgaggctgcaatgatcttaatgcctatcggcaattatatctaggccagaagagggaaaaggaaagatagcatagattataaaaatctcaattaagcatgaaacaaatgaaggt

SEQ ID NO: 14736 - DNA, 358 bp, Gossypium hirsutum
tgggttgcacaaattctctaacttccaactccaacggttcaactcgtgtggattgaataaaattcctcgagttggcttccatcagagccatgttttcttcacctttttcatcctccaaagggtcaaaccctaaggctttctctaatggatcttcttcaagatggctttccatagaaatcaaggtttctattttttccataactgagcactcttctatcggatcaagaaatttcatcactttaagaatgttaaaagttacctgatcatcttgaactcgcatggtgagttcgcctttctgcacatcaattaacgttcttcccgtggctaggaaaggtctcccaagaataattggcacttc

SEQ ID NO: 14737 - DNA, 474 bp, Gossypium hirsutum
ttgtgtttgcttgatctcctttaattagtggtggtatttttccggaagacttagaaaggatgatagaattgattccttggcgagtggacatattgtcttagacattaaggattgaggatgctttgtattacaatctcagtgatacaccacaagagcattcatacattttttctcatattttttacttccataatgcagaagtagctataggaatggtaatatgataaaatggtgacacactgggaattgtcatgggcgatttcctttttgatttcttcctcttaaagcataagaatgttcaaaattttgagatagatatatatgcttctgttcagtaacgtgtggattttgataagttcaaaactgaatgttctactcaggtttctcgatcaaattctgtgcccccaaatacaagggattctttataccaagggctgcctcctactataaagtccgctctacggtctagactga

SEQ ID NO: 14738 - DNA, 581 bp, Gossypium hirsutum
  misc_feature (64)..(64): n is a, c, g, or t
tggctttttatgctgattgctgcactaaagaagagattttctcttcgttcacttttaccccttnaattttgtagaagtcgactttaaattttttaaaataatgattaaggcttcaaattttttttttattttttgatacctgttttgcctagttgaatataaattattcctcatggttaaatacattacgtcaccgttcagatcacgaaatagattctcagagttctgaatcggaactcaaagttttgtttttcttttttctttttttttcttgctgctgattcaatctaaaaagtaattttttaaaacaatgaacaatgaccaaggcttcaaacttttttattttttgatacttattttactctatcatattgtcactagttgaatataaattactcctcatggttaaatacaccacatcaccattcagatcactaaatagattctcagagttttgaatctgagctcaaagttattttttttcttttttctggctattgattcaatctaaaaaatattttttaaattttttaaaatatttttttaaaaaatttaaatcaatgtcgcttgacaactacacc

SEQ ID NO: 14739 - DNA, 473 bp, Gossypium hirsutum
tttttccccttctaactccaatttcttatagtagtatggagctcgaattcttcattgatatatagtttcttacctaaatttatgtgatcatacatcttctgcattacagcaattcaggccaggttataccgcgccacctcccttgtttcatattgggcgtattccaatgaacttcaggtaagttttgtttgaaatttaactgttttaggtattaactaagaacttctagtcagattaagagattttaaagtgcttcatttttctctagagttttatgaataagtaacctttatgcctctcttttttttattatgaaatcaggggcaattgggagatatctaggagggagttaaacaattctggctttatagcagtggtctcaacagatcacagcttactggattctcgctatgatgaatatttagcttcaactacaagaagcttaaccggttatcgtatgggtgcaatacttg

SEQ ID NO: 14740 - DNA, 450 bp, Gossypium hirsutum
cgcattaccagtagtaagggctttaatcatgccagcacggcgacccttgaaatctcgaaagacttcttcaacggtacgcgggttgtaagcgtccattagccacactaattcttctctttcgagcgaggatcgtgaagcacagggagagagaaagagaggaaagaaatggagggaaagtaaaagatttgcaaagaaagttgaaaaataagaaaagaaaaaaaattatgagtatttgactgacccctctctttgcatttctctcggtttggagggagaaagaaggaaatacagaattgggcgaaattcgaaatacaaaatatttggggttttcctaattaagcggatttgatgagacagggaagagactgttgctctgatttttggcccaatgtaaaaaagaaaagggaaaaagaaccctaaatggaaaagcccccttcccatgaaatcaaa

SEQ ID NO: 14741 - DNA, 674 bp, Gossypium hirsutum
ttcaactttctgactcgaaggaagtaatattcatcgttttatcatcttcctcactgcaaccaaaaacgaaggaaagttaaggggacggtcaagataatgagctaaactaacactaaacagctcttgtacttcttttatttggataacactaaacaagttacccgccaagcataagctaaaccgattaaattatggcaacaatttgttaagcacaagataatgagctaaactaacactaaacagctcttgtacttcttttatttggataacagggagtgaaaacagcctctgattgttttctaaccaatattcatatacatatatatatagccccacccacaccacctttcatatttaattgagttccttttaaaccaagtttttctccccaccaacatgaatgtcaaaaacaagatctgcaaaaccaaacccttagaaaccaatgctttgttggttcaagtgacaaaaagcttggtccctctttccaccatgagcttcactaaaaaacttaggaaaagtaaatccttagaaatattggtaaatcgttaaatattttggtaaaaacttttcctaagctttttctaatgaagctcatggtagaatttcctaagttttcccccatttggggtagacagactctagaatagtcgaggcctaatgtacctttccataaa

SEQ ID NO: 14742 - DNA, 645 bp, Gossypium hirsutum
cacctcgactactcattctggaaattatgcagtctcaccccgagagttaaccttgcgtttgcatgaagttattcgatcaagacttgaagaacgagtacaagaactcgagacagctctagagaacagtcacaggaaggtgaaactgatggaatcagagcataagaatcctaacaacaaatggacatattcgacaacagagagtccaccggtaaatgaagatctccattggacatcaaagcctcaagttccaaaattatcatgggaaactccagatcatgcatacaacgaggcttttgaagaggcaaaagaagaggggacaccattacgtatttatcaagaaaagctgggttggggtgatcaatatgacgcaaataaatcagatgaaacattttacgatcaggtaagaatattggaagatcaatctttgagggtccaagaattgcttgatgttgatgttagagaagatgaatgtactgataatgatgatgaaatggagaagctattgatacaacaaattgtggagaaaaccaagaaaggatctcctgtactgctaaatgcacaaagattattgttttccatggatgaaatttgagaaactgaaaattttgcagttaatacatataagacttgcattcttaactacag

SEQ ID NO: 14743 - DNA, 366 bp, Gossypium hirsutum
cagacggtcccacttaaaatttaatctcctaaataagatttttctctaatgtaattttagtaaaataccgaagtattagagaaaaaagaatgagagaagctctagtttgttgctatgctatataaatatgaaagatggactgctatatatattattatttggagggtaaaatacgtaggagcaagatagtaaaaattgtagcatcagtttgaaattgacccactatttttgcaacagtaaaaaatgttagaggattttatataactaaaaattctgaaaataaaaatatatatttgttataaaatttatcaaaataaaaaccataaacaatacatgttaacatggagaaggttgagtgatagcatt

SEQ ID NO: 14744 - DNA, 607 bp, Gossypium hirsutum
  misc_feature (231)..(231): n is a, c, g, or t
  misc_feature (234)..(234): n is a, c, g, or t
  misc_feature (263)..(263): n is a, c, g, or t
  misc_feature (266)..(266): n is a, c, g, or t
  misc_feature (268)..(268): n is a, c, g, or t
  misc_feature (270)..(270): n is a, c, g, or t
  misc_feature (276)..(277): n is a, c, g, or t
  misc_feature (315)..(316): n is a, c, g, or t
  misc_feature (329)..(329): n is a, c, g, or t
  misc_feature (569)..(569): n is a, c, g, or t
  misc_feature (585)..(591): n is a, c, g, or t
  misc_feature (593)..(603): n is a, c, g, or t
tcggtaagaccattgcaggcttcggcctgcacagctaaattttgttggctagccgaaatggtcctggtagaaaacttggaattcaattcttctatacttgacgtgaacttatccatcctttcattcaaagttgaaatttgctccgagagctgtgtaacaactccctaaaacacaaatgaatgatcagtaacgaaagaatgaaacaaaaatataaagggaatcttttttaancantccaaaaaaaaaaaaatcaaatattaagnccncngnccaagnntgatttatttgattgagaggtttaggattcattcggannccaaatttttcanaaattttaataaatttttggagaaatggaaattattcctttttttttcttttcttggaggagataacggggggaggttgtcaggcttttgttttctttcacttgaacttttcagcaaccagaaaggttgtcaggttgtcaggattctgacagtggataaagaaaaactagacttgtgttccagaaatcagttcagggtcaacatactcaccggattcactactggagtaggtgactctgnggcccttccatcaaannnnnnncnnnnnnnnnnntttt

SEQ ID NO: 14745 - DNA, 653 bp, Gossypium hirsutum
aatcctcccttctggtactggttaaacaactccgttagtttctatactgttcgtaaccaaaaacttttgaagtatatgaagttgtgctgatttccaatctcaatttccagattttcattgccttgctggtgtgcccatttgacatcttctatcggccaactcgatactgtttcctacgaataattcgtaacataatatgctctccattgtataaggtaattaatacacttgcaagtttcttgccattatcttttaattggttttgtatgaagtttcagaagaggtaacttagcatgttcttgctttggcttattgtgtatatatgcaggtcttgatggttgattttttcatggctgaccaacttactagtcaggtaaattattcagagacaagcaatggaaactaaaacaaaatattagctctcattttagaattattttagaaccatcaccatcatatctatctttttttcttactacagattcctttgctaagacacttggaatcaacagcctgctactttcttgctggaagtttcaaaacccatgaatatgcaacatgcaaaaatggaaaactctatagacagcttgcttatgttatctcatttttgccatattattggcgagccatgcaggtacatggaatcccttgca

SEQ ID NO: 14746 - DNA, 655 bp, Gossypium hirsutum
caaagtcagcatcaagcctaaaaaaattaccaatcatttaaaattgacttaatacctattttggcccccgtattatagacaaattttcaattcggtattttgagaaaaaaagattagcccgtgtaatttcctttaatccatttggtaacccattctaaattttccttacaaaaatgttcacttaatcaatggaacgttgacacatgtaaaggaaagaaagtaaagaattggttaaattctataaaaattcaataaaatcataaaaaaatccaaaacaatatctgaaaactttgaaatttctaaaaaaacttaaaagttcataatttatttttgaaaaatgatcaaactatatttttttctaaatgataattataagaaaaattcaaaaattttcaaaaaaaattcataaatgataaaaaaaacccttaaaatatctaaaaaattgaaaatctaataatttattaatgaaaaaaataaatgtttttaaaaatgataattatgtagaacttcaaaagattccaataaaataaaaaataaaaaacctaatgttccaaaacaattcaaaatggaaaattgagaaattattttgaaattacaatgaagtataaaattgttgaaaaatgcttccagaaaaaatcttggcaaatgtacgtcg

SEQ ID NO: 14747 - DNA, 611 bp, Gossypium hirsutum
  misc_feature (605)..(606): n is a, c, g, or t
ttttaataattaaaatttaaaaacagttttataatttttataaattttaaatttttaattaaatgctgatgtgtcatacaatgcaacgtcagcaaaatcttaaaaatcgtcaattttttcattcattttggagcgatttgattaaaaatgtaattttaaaaactaaaagaggtaaaaaaataaatagacttcttttataatgttgaaaagtcaaacaagtcattatgcattgaaattataatgtattatcatgttgagattagaaaataaatcaagtttaaattaatattaggttcggattttgctgcatattcagattgtgtagaattgttaaaattctaagttaattttggattattcttttagatttaagtttggatttttttaaattcaagataattcatgttcgggttaatgggaaagggataacctgatttgtgaacaataagatttacagtctgattttaccacatcaaaataaattgtgaaatgaagtttttcaaccaaacacactcgttcatattaaaaaaaaaaaaatggggcggggggaacaaaatggattacccctaaaataaaattccccgggaaaaaacatcaaaaagaannaccct

SEQ ID NO: 14748 - DNA, 370 bp, Gossypium hirsutum
aaagataacataagtaattaaaatataatctaaaacagataaaaataactatttttatagtttatcctaaattttattactgacaaaaaatttggctcaaattttgacaatcctttccctacttctaattgaaaggaaaatgcaatatatatataacataaaatataattcagtatttaaatttccacatttacaaattttcctactatttctttaaaaataaatgataacattgtatttaaaaaaaaaaaaaaaaaaaaacttcgaaagatatgcttgtcttcaatggtgagtgattgcaattgtacattcaatatttttttaagtacgaattaatcatatcaagattggaaacatgaacctccaaatg

SEQ ID NO: 14749 - DNA, 505 bp, Gossypium hirsutum
tgtttaattataagaagcattgaaatggtaagtacttagatgaaatataatttaagattttgcgaatttttttctatgatcctgatttagttccggttggtttctaatgtgtgttttgggtttcgagggccctatagagaggcgttatgattattttcaaaatatgaataataaatgactcagaattgtctgaaaatgttcagtgaactccggtaatgcctcgtaccctgttccgacaatagatacgggtagggggtgttacagacatagcccagctatggtcttatacgggcgcacatatcacatcttttctgtcaattcatcatggtcacagaagaaggcacgcaaatctattgttccaactaatttgtacttttacttaaatattatttcataattattacaatttgatagtattcatctactgtaatatatattagcaaatcataagattttcataacaaaacattaaatttttccatatgaacttacttgggctgatttg

SEQ ID NO: 14750 - DNA, 631 bp, Gossypium hirsutum
tagttgcatcggagaagagaggggagttgatggaaaaggttgatgatgggaatttgaacttcttgcttgtcgctaatggatctccagaaacaactatgttgtccccaattgcagatcaccatcctgagaagaagagaagaggaaggtcttccctaagccgcaagtcattgagcctggaccccattgtggtgccagatactgtttttgcactttcagataaacctttttgttcttttcaaggacattcggatgatgtgcttgacctctcatggtccaaatctcaggttagtcatcattcttcaatcctgtcaggtatttgagaattatgtaaaaatatagagttattagtttgatcatcattgagtgttccattttttcttttcttaacctttggaatacttttaacacataatctccagacatattgttgttgtctatttactttcatttagttgaactgttaaattgatctgttgatttttcttatactgagggtttatgttatatttttctgctagcccaaagtaggcaaaggaatgcatttttatttctactcttctaaattgtgctctatgagatgctttttttaatcaagtttttagtggcaagatgaagttcaaagttggaaaaa

SEQ ID NO: 14751 - DNA, 638 bp, Gossypium hirsutum
cgctaataaacaatacaacaaattacaagcttaaagactagaaactaaacattaatgacaacgcaacaaacagatcccattaattaacacaaaagagacgctgaatcaaagtaacaccacacaaacaacttcgagacccagtccaatttactcatgcaccaacttttcaaggaatatatatatatacacacacgtacacacatggttagagagtaatggaagcagtggagttacgaggtcttcgttgatgatgatgtggcagtggagttggacgtcccagccgttgtgcaagttttctcctttaccaaatccccaatgctttttgcctgtcaccaaaatgtttggcctcttcctcttcttactgtctggagccatacataaaccttcttcttcctcaatagaaagatcaaccgaaaataacctcagaacaggacactctcaataaataggcgccgacccctttatctcacaggcaaccaaatcacgttttgtgataggtcagggacaatgagcagaggagaaacaggaaatccaaggtcacactgaagcaaaagcccacggtgccttgcagaagttctaaagccatgccatgaccgaaccttccacggcaaccaccaccctgtcgcaggataaaataa

SEQ ID NO: 14752 - DNA, 676 bp, Gossypium hirsutum
gcaatatcctactgactcatagcagctagtggagattataattttgaacatatagccttccatccatatggtatgctaaggcaagtcatcttcatcaatatcatatgggccatgctcccatgatatatagtatttcaaacgggccattattgtttgtttcatactgttgagctatatgatctacatattgcaatttgcagcagcatatagatgttaaagtatcatggagacccttgtattagaagttagattgcattttgccccctttacttaaaaaataggaaaattagtccctgtacattagatcaaagagcaaattgatcatttctgttaaaattttcatccatttccactgttaataattaacatggctgacgaaataaccagataattatacatgatatgttacgtacacttcatgctgatgtacaaggactaatttttaacttcaaaaattgataaaatttttaacaaaagaatttgtttgccctttgattctacatataggtattaatttacccattttttgaatagagggagaaaatacaatctaactcttagtacaaagagctttatggtacttttacgtataaataaccatgatgttgcatgcattgttatagccacagatacatgtatatgtaaagttcatgtctgttcaacttcaaccaaatgg

SEQ ID NO: 14753 - DNA, 609 bp, Gossypium hirsutum
gaaactgaacaccgtatcgttgaagttagtctcccatatttcaaattgaaaaacacaaagacaaaaattgatctggtctgacaaatacccttctctttctctttttttcccagcaatgggatcgattgggatgagagagagagtgcgttttgttcttggatattgcattcttcctcgtttttcattcgctcagtatcattattatagtctttctgtttcacatcctttccgccttttgttttcgttactactactactactactattaatttttaatatttctcaaccatctttcatctgtattcttctttttcctttatttaagctttcgtctatctaccattactattttcatcacgacaccactaaggctattatcttttaagtatttcttttggaaatctaaccgcacatcttaatcacacactcaccactaccacattgattctttattctgagagagacagacaagtagcttctccttatattttttctttctttctttagagagagaaatactttgtttgtagtactaattaatgtctaatagtttagtaaagtaaattcattttttattttcgtctatccctagtttagagagtgaatccc

SEQ ID NO: 14754 - DNA, 584 bp, Gossypium hirsutum
tcagataaatccaagctatcgcacaaaaggcttagccatgctaactacagatcaatggcttagctaaccaaagaggacctggttgaaaactttactgattcagttgagaaaaaggaggcttgtgaagtatgtcagctaggaaaccaaatcagaagtatgtcagctaggaaagcaagtcagacttccattcccttcaaacaaagcctggagagcttctgaaagactgcaacttgtgcacaccgatatgtgtggttccatgaaaactcagtctctaaatggcagcaggtatttcatcttattcattgatgattactaaaggcattgctggatttacttcttgatgcataggtctgaggtagcctcaatgttttgaaaattcaatgctacaacagaaatagaatcaagatgcaagcttaagactctgaggtctgataatggaactaagtacacatcagctcaatttcaatccttttgtgatgaagcaggcatcaaacaccaactcaccaacacctacacacctcaacagaatggtgttagtgaaagaaagaacagaagtttcatggatatggtcagatacctgtttg

SEQ ID NO: 14755 - DNA, 357 bp, Gossypium hirsutum
  misc_feature (346)..(346): n is a, c, g, or t
  misc_feature (348)..(348): n is a, c, g, or t
ctatttttgacacttgactttccttctggtgtttatcaaattacttgcgagaaagacaagtaatttcctccctggaaaggagagaaaagtggatgcaaagataaaatatttctcatacttgcttggtaggatggaatgacaaggggggaaaagtgaaaagttattgcacttacatgagtttttgtcagtccataatccaatgttttacccaaaccattccatgttcctttcaatctaagagggggaagggaggttaagtacttagaatcctggcaattcagttaaaattggatagaaaaaactgttcattcacaaatgcttccaataaattacctctcctatttcncnaaagtgtca

SEQ ID NO: 14756 - DNA, 550 bp, Gossypium hirsutum
tttaaataaccgatgaaccggcaaattttgttttggattaattcaatttttgctttagttagaataatttatattattaatgactttttcgtagagtgaaccgtatcccttttgagtatcaagatcaaccttagaatgcattgattctctttatagttttgatagaaaaggaaattaaatagtgattgcaattaaatgtgattatgatttgaatatttaagcatgatattaaaatgatttatgtttgttcaaattcggcctgactcgaaatatgagcttataattttttttaaacctaaacatatttgtaaaagattaactcaagcccattttaagtccacccatattatttttaaaaaaatatttatttattttattttaatatttaataatttatatatttttatttgttgaaaatttttatatagttatcataacattattttaatgtttacattagagtagtattatatatttaacataattttttaatgtgttctaatttacataatataaagtatcataaacttaataatgggttgcgtcaggt

SEQ ID NO: 14757 - DNA, 635 bp, Gossypium hirsutum
  misc_feature (67)..(68): n is a, c, g, or t
  misc_feature (70)..(73): n is a, c, g, or t
  misc_feature (629)..(629): n is a, c, g, or t
attctatctattttgcttcattgattaacctatataatcactttattattattagttaaaattgctnngnnnngtcagtccaggcaatccattgagcttcgaatatgagtaatgcatttataattttgtaccctatgtcagtgtccgtgatagtagcatcctgcctttgcttgggattcttcaatttatttatggattattgtgtttggcccttgtatttgtgaccaaggaagaatattatcttctaaccaccagtttgtattatctcttttacctgcaaaacacgtgtaaaatagatcaagcttataataagtggcttcttatcagctataaatggtagattacttgtagagaaagtagtaatgattttggttaataaaaatgatgagtgaaaagccaacctccacccaatccttctcaagcactcggtaatcagtaggcagtagtagccttggatgccaagaaattgggctggtagaggaattaattatgatgaacaagcccacgtgtaaaccgtgcgagatccccagattcaattatatgcaagtaacccctccaatgacaaacaataataaatacatgttgccttcaaaagaaaaaaaaaaaaaaaaaaggcttattacggggtnctttct

SEQ ID NO: 14758 - DNA, 605 bp, Gossypium hirsutum
  misc_feature (51)..(53): n is a, c, g, or t
cattatgaatttctacaattgcgcttatctttattgcattccaattcattnnnttcctccatgtattccttgaacgaatgtacaatctaagaatcataagaaaaaggacatgaaaggatcataagacataaaaatccgaatatttaagctccaaccatttctatcttgttattgatgttcaggtaaaataatccaagttcaaaatttgcttacaaagaaagtacaaacatttccagccaatatatatatagtatgatctttacctgtaacccagagaattaataaaagaaatgaatatttatggtcgtatcagtttatagtttgcgaaagatgaaataaactgcccgtcaaagaaattaaagggatgacagacaagctctactttatgcaagttctgatacgcgcataattcctacatgtacatgacactcttacctctatgttgttgcgaatctcagctcctctgctagactcaggatctccaagaatactaacagggtttgtaagcttttggttctgtagccttcctaaataaggacccaaaactttgtttaccatattttttactatgctaaacaacttatcctctgtgattaattgctgcg

SEQ ID NO: 14759 - DNA, 657 bp, Gossypium hirsutum
gcatgcatgtgatcagtagtcaagatatggtgaagtagttagctctgaattttgatactagcattttacagaacttctgaacaatttgtactatgattttggttttttattttttttacatgcatttaattgctaagcaatacatacctttaattgctaacctttcttattgcttagttgtgcaataaactcatcaattcctctagccttggtgcattggtcaatgtcctcaacttacagtctgcatatctttatcagggccagcatattggactatgttcagcacttagagaccatggcctccagggattacattggtttctgacaaaggtcatgcacttgagaaggaggcttggggcatgcaatgccagatttgatagattttcatatctcgttaaagttaatcagcagtccataaaaatgatactggcaatagtatttgtcttcacacttttaggtaagtgcactatttgtacataccatcttctatttgatttactctacttgtccctgctaaattcaaatgatctatttatggatgtatcttgattgtcaaatgatttacctacatttttagcttgtcaggcactctctctatagaacccttttcatgcttgtttgtacaatcacttttgagatgtatgcttgtgtgaatgg

SEQ ID NO: 14760 - DNA, 675 bp, Gossypium hirsutum
ggtctattaccttgcatcactgcaaagtataagagttatacactggactatatatttgtgattctagccgaattttgattgaaagatatggagacaagttcccatgaaaatcccccccccttccacagcttccccctttgttccctttctagttgtagcaccaaaaatttgagccgtttcagcaaattgtttgagaaaagaaacacaagcccatgggaacagccagttagcatttttgaaggctaacaggactgtgctgaccatgttgaggcaggaggcatattgcaatatgcatttggctttagaagggaacctgcttaatgactctgaagctactcgatctcaaagacatttgtagcacatcaaggaaattatgtcaatttcagtgatcccctcgatatattgcctgtgatgttgcattatccacttttatcattgtgcttgatgagatactattcttggaatagtagacacaaagatgtaaaccttccccttaagatgtgtatctgagatgtctactgatcaattttatgtttctctatgctaatttggaatagatggcattcaaaataaatagattgcattttttatgtgcctcttagaagtagaagacaggcatactgtaggatctagttactatattgaaatttaaactgatgatgaccagcaacatgt

SEQ ID NO: 14761 - DNA, 407 bp, Gossypium hirsutum
tctgcattgcgtgatgatcctgacccatcttttctacagaaatgtggtagtgatgcaatatccattatctataaacataaaatataatacgcaaccaacattatcagtattcttgaagcagacaaagtgactgcgaaatggtgtttaacatcatcatatcatatctaagtgaattagttatatatctccttggacttctgacaaagaaacaaggtctaatgatttacgggtgaagcaatcaaaatgaaagatgatggaaaagaagaaaaaaactgaaaccttgaatcatgctctttctgggtttacacttagtattctagcaacaatgacaagtatagaatatgacaggaaataattggcagccccattacttcaaacagaaagaatcaggaagagaaatgcagatt

SEQ ID NO: 14762 - DNA, 683 bp, Gossypium hirsutum
cgtggaaatagaggctcacatatagaatcagtaaccattagacgaacttggccggtgacagtctcaagcaacgttcttctatcaccaaaagctaaccgactaaaaggaactacagcctcgctccgtccagagacctgttgtgatctcgataaaccactatttgatctacaaacctttcttgaaatctcctcagtggaatgatgagtaaagctcttactaggcaacaatttacatccattccttttttctctaggctcaacctcaagaaatagcacattgcagttctgctccacggattccaccaaaccaggatataaaaagtcacatcctttctccctaccgtgaagaagaaacgtggtagaaccatcaaaatcaccaataatttcaaacactggtgcccacagaatggggccatcctcgattcctaacgggccaagctcttgcggaattattcgacatccaacaacagaaacaaaaccaggcattacatagactacattgccaagctcaggattctggtgaacccaaatcccaattaatggctttactctaacaaggaagcgacaaagcgccttataagatactacaccttccctccactccactaggtcccttgtaggcacaattccaactacatcacattgactgagccaaatcttttcagaggctacgagtgcagatag

SEQ ID NO: 14763 - DNA, 690 bp, Gossypium hirsutum
tgaagaagtcaccatttcctttagttcttgtttgcttctaacaattctctccaaagcagtaaaatttgtaacaaatctagtgatcttaggttgtaagagttctacacacttgatatattttttcatataatcaattgtccaagtatgattgtatacgaaagaagttatcttttttgcctcatctaagacctttttcacactttttctattaccaatttcttccaaagtaagatccaagcaatgagcagaacatgtagaccaatacaagtgctttctcttttgcatcatcatatgacccccagctttgatagctgcttcattgtttgtaacaaccttaacaacaatttttttatcaatttcactgaccattttgtccatcaaaccaaaataatactcagcagtacagaaggtaacactgctagcgtcaatggattttttaaaaatattacctcttgtactataaatcaagaaattgattatatgttgattagttgcccctttccacccatcacacataatggtcacccctctttcttcccatataggcctaaagctatttacccattcttgtatctctttatacttgtcttacaaatacactcctgtcacctcataaactgaaggacccctaatcaattttgcaacttctgttgcaatttgaagtgcaggttggagaaatggtgactctac

SEQ ID NO: 14764 - DNA, 494 bp, Gossypium hirsutum
  misc_feature (474)..(488): n is a, c, g, or t
  misc_feature (491)..(491): n is a, c, g, or t
gcaagcaacacatctcatcacttatgtatcaatgatataaagacctcaagtctcacaatccttacaaataatctgcttagtcatataatcctaaaaaagatcatgattggaaaaaaaacaagacaaagtagtttaaagcacgagtaagcttactaacaaacaataggttgagagagaaatcaagtaggtttaacacagagtttaaagaaataaatgatgtaggattaacgattccaaatccaagaacacaaaaggtacacctatctgctaaaacaactttagtagtaattgtatgtggtttgaaggtgcagaagagttttggattacctgtcatgtgatatgtagcaccaaagtcaataaccaagttggatgatgaagaaatgatgcacttagtggagttgcctaatttgacaataacaatgataagaggggtggattttttaaatggtggaatggtctgagtaatgtgtaaannnnnnnnnnnnnnnggntaa

SEQ ID NO: 14765 - DNA, 571 bp, Gossypium hirsutum
tagatagcagaaatcgaaaaaatcagcgagcaaatgatgcgttttaaattagatgtttcttacctttttgtttttccatagtctgctataaaaagcagactcaatgctgtaacaggggacgaaaatcagaaattgaaaaaaaagcagtaaaaaatcataattttcgaaggtgatttgattcttcttttcatttagtttctttcctatttccttagtttttttttcattgatgtttgcttattgtttgagaaaagagataggcgaaggcttacctttattttagcaccgtgaaatccttgtcactctgtcgcaatcggagtttgaaggggaagacttgagaacgacgaggggggaagctagggtttgcaaatctattgtaaaatggcttaatacatttgttttatttttagctttatgcagaccataaaacgacaccgtttgaagctcattccaatggctctaaaacggtgccgtattgagccatacccgatgacccgatccagatgcggctagatccgcacgttttggtatggagagggatattttcgctctaagtccttcttttgtgact

SEQ ID NO: 14766 - DNA, 626 bp, Gossypium hirsutum
atcttcttttggcttcgactttaacgaagcaaagaaaagaaatccatgtcattttgcaaggtaaaacttaccttttcctttttcttttatttttttacatgtaattatgaaagactcaacaaaacaaaaaaagaaaatggaatcgaaaattaaagagactggaaaatggagaatcaccttttggttttgatagcctttttttttatttcaatatgcatagtatgcgtaacctcgaaaatacattgttttttggctttatagccgaaatcccaaaacaaataaaataaaaaaaatacaaattttcttcgttttttcctatttgctgttgtcctgctgccgtttgcttgttttttgtttgcaggcaaggggtacggggccagctgtggtgcacggttcgttgacgtagaggcgtgggcgtggttatggcgcaaggaggccgtacggtgctgctatggagatatggagagggcagtcggcgttggaggctgctagggtttgctagcttggctacacctaggtttggattttgggccattgggccccgttgtaaatggggatttgggtttgttattaggctgatgtaaatggaccgaactattaatggactgttttaatttggttttttt

SEQ ID NO: 14767 - DNA, 600 bp, Gossypium hirsutum
aaatctatctttcaaaagaaaaagaaatccaaacaaatctgcaaatcatgagctccgcggcagcaacaaccaccaaaggaggccggggcaagtcaaaggctaaagccgtttcccgatccagcaaagccggactccaattccccgtcggtcgagttgcacgttttctcaagaaaggacgatacgccgagcgcgtcggatctggatcccctgtctatctctctgccgttctcgagtatctagctgctgaggtttgtctaagcggaactatcttttatcatgcggaaatctcttagatttttttaataaacggagtaactgatctgtttggggtctctttaatattacaggttttggaattggctggaaatgcagcaagggacaacaagaagaacagaatcattccaaggcacattcagttggctgtgaggaacgacgaagaactgagcaagctgttgggaggtgtgacgattgcaaatggtggagttttgccaaacattcatcagaatctgctgccaaagaaggcttcgaaagggaagggcgagattggatctgtttctcaagaattttagaggatcttgtagtgcattggggtgatttttt

SEQ ID NO: 14768 - DNA, 746 bp, Gossypium hirsutum
accccgatgcacattgaaagatcaaaacccattgaaactcagcaaaatcaaaattccagaacactttctctagacccttcatttcttcttcccctatcctcacccactacctccatctgcctcctgtcttcagctatcgcctccaccgcaccaggagatattagatttgttaagtaagtagattctcttttcttgagtccttcttgtgctaaacaatgggcaactctgttagcctccctgtttgtgaaaagaaaaacacaatgattaaattgacagctgagatactgagcatctttgatatacacagaaattttagatctgtcctccttttcctcttgcagcttccgaatgatcgttcgagaattaccttcaacctcaatcgccctcaacccaagttgtaaccccagcttcagtgcctaaaaacacgctactgcttctgcggaaaaaacagacggtatgttcaagttcattttcgttttacaacagataacctctactgtactgttacgaatcactaacctagagcatgactctttgttgtgattgttgaaagttgcgtcaaagttcactttcaatctcgatcccatcggagcagtccatctgtccacacagatccatctttcaagtatagcactttttagatcatcaagttcctttaaataaatttgcacaaaacttgcaatctgaacgcctgtttggttttccccctcatgaataaatttgttccgagacgtccataacgccta

SEQ ID NO: 14769 - DNA, 783 bp, Gossypium hirsutum
acgtcatggtaggagattcaagctcctggtccaccgctctcgtcaagatttcaccttacactttctccgccatcggtatcgcaatcgccatcggtgtctccgtcctcggcgctgcatggtacccttctctttcaaatttcattttgcatgtaatctgggcataatttatgaaatagatattaaattgttctttttttttaaataatttatattcctaggggaatatacataactgggagtagtttaatcggtgctgctattaaagctcctcgaatcacttccaagaatctaattaggtaattaccccccccttttttaattttgaattgcttttattgcgtgatttgtaaagcatcaaattattattgttcctaaaatccctaatctattaattttggtgaaagatttattaataaactatcatttaataatgctttatgtttcagatttcttgatttgaaactaaaatgttttgctggcctttgaaaatcagatagtggaaaataaggaaattgttgatatttttaagtttttcgtatatcccgctgccttggatctgtataatgtttaagggcggaacttcattccagctaaaaggaagggcaggcaggcaggctggcgttttttaactacaatcatgtttaacaagagaagctatgattttagttttctcttgtatagatcctgtctatttgtccccagatattgccttgcaattttagagatggcctccctgctattgtaatttgagactagttgctgtttgcttgccttgctcgatta

SEQ ID NO: 14770 - DNA, 751 bp, Gossypium hirsutum
  misc_feature (744)..(744): n is a, c, g, or t
  misc_feature (747)..(747): n is a, c, g, or t
ttttcttctttctctacctctctcttttcatctctgtcacctgccacgggggcagtcatgctgacggtgatgatgatgatgatgacaaggcaggtgaaaggaatgaacctcatgacctacgatccaaatccttgattctggtcaaggtatggtgcttgattctagtgtttgtagggacgttcgtaggtggtgtgtcaccctattttctaaagtggaaccagggttttttggtgctgggaacacagttcgccggtggggtttttcttgggacagccatgatgcatttcttgagtgatgcgaatgaaacttttggagacttgacgactaaagaataccctttagcctttatgttggcatgtgctggatatttgttgactatgctagctgattgtgtgatttcttatgtgtacgggaaagggaagaattcatgtaacaatggtgatttggagcttcaaggtaagcaaacgttttcatattattctctttcatgaattttaaatttttgcgttgccgtaattgtgtgtttctttaagaattggagaaattatgggaaattgagaagagatccagcttggtttggaattccagttcatgggatagaagacgatgaatccaaagttaattcaggacccacgtaataaagaaatctatattaagtataaataatatctggtaagtgagacaagaaaatttcacatgtcttgtcttgtttgattaacttgtcagataaaaaaaggcatcggnaangatg

SEQ ID NO: 14771 - DNA, 751 bp, Gossypium hirsutum
agtccctctctttacatttttcgaaacatcagatcgcaaatcaaaaaccaaaccgatccttcaacacaatctttgtcttgtgttcgaaaaatagaccaaacaaagtaccgaattgaacgaaaaaaaaaggcgtaattatcactgggaaaaaagctttaacgaaaaatcatggcgagatatgatcgagcaattactgttttctcccccgatggtcatttattccaagtggagtacgctcttgaagccgtccgtaaaggtaacgccgccgtcggagttcgcggcactgatatcgtcgtcctcggtgtcgagaaaaaatccgccgtcaagctccaagattccaggtactgaatttccttttaaatgagcttatcatctcaaataaggatttcttttaggttgtcaactgaatattttatgttaatttatcgaaattcattcataatttgtttaatttccttaattaccatttctagtttgaaacattctaatttagtcccgtatcgtaccgatcagtgttgattagctttagcgttgaatgtaagcttaatttgagtgttttgggggccaaatgataatttaccattttgggataattttatctttgtatgtacttgttaatttataattttaaagggattaaaccgaaaattttcatctttgagggccaaatggtaatttatcattttgagcggtcagcgtccttgcttgcccctcggtgccatctctatttagaccgatggatcaaaagtcg

SEQ ID NO: 14772 - DNA, 803 bp, Gossypium hirsutum
cgttctcgcctcactgttgctctcctcaacaaaaccccaatttttatccccgatgcaaccagaatcctgacccgaaccaagacatacgggtccggctacttgccttttcgcgacccttcccgattaccagcggttgtcctatatggccgtggtgacgaatattggcttatcattttggaattcccagaacgcccaaaacctttggaagaagaaatgatcgatacctatgttaaaactctcgcttctgttgtcggcaggtttttaaattataattattccttcagatttcattaaatttgggttttatttttcttttttgtttcttctgatcttgtagtgaagaggaagcgaaaaagagaatatactctgtctgtacaacgaggtatactgggtttcgtgctcttttttctaaggatttggtcaaaaaacttggaggtaatttcatttcccatttactacggtttagggtttacatggttttccctttttctagtgtaattggaacaagaaatgggttttttgaaacaatgggttttcagaaagaaaaaagaattaacattggttttcattgtgtgtgatgtgttgttggctgttttagggttttaaacctcccgacgtgattgctttttatactaatttattagggtttaaacggtttttcccaattgcttttgtgattgtttttgtacttacaattgatgaggcatccgctttgttctaaaatcaatgggcattatgtttttacagagttacctcgtgtacgctgggttttatcagatgactttatctatggtcaagatcgt

SEQ ID NO: 14773 - DNA, 764 bp, Gossypium hirsutum
ttttactacaaattcctttcaataatataaaaagaagcacacagatctgctcattttaattccatccccaaaagaaaaaggtaaaaaattttcctccaattttccatgttttctttttattttccttcttaggtttattcttgatgaagcttttcgtgatatttgattgttttaggcatttagctttgatgggtttaccttaatctttgctcatctttttaagggaatttgttcaagtactttatttaactgtcaagggtaacctgaaaaaaggagttatggtggttttatgctttgcttttggattagttgattcttaattatgatgaggtggccctttgtatttatattccatgttatgtttcatagtctgtagggatgttgatggatctgtataaatttgtatggcgagtagaaattagatacaaattttcaatatagagtataccttatatggggctaattgaataaatatagaaacaaatttatggtttttgtgaatttttttttatcactttctgttatgatttgctttgaaatatttgtgatttggcaacaaatacagccatttcaccaggatacaaactttaaaagacaagaattaaatgctacttaaatatttaatttccaaggtgcccagaatatgaattttgcaattctcagaagttttctggctgcttttgcatgaactgtatctgaaaatttttggtttatgtaccgatacttgactctgccctgatcgaagtctggtaaattgttctgaa

SEQ ID NO: 14774 - DNA, 772 bp, Gossypium hirsutum
cgggagtattttttttcccatttttattttttgccctcagcttcatcttctcctttcctttccatctctgcgtttcccttttttccttcttatttcccttcatattatttcccttttttccttcttatttccccatctgctgctattgtttctgttcgccttcagcattcggcttggtttctcaagtaagcatttttttattctttttattcatctttactgtttctgttcgccttcagcattcggcttggtcttcagcattctgcacggcggctgctgctactatttctgttagaccttttattttctagggtttctgtgacttaaaatgaaatagctgtctcgtatttttcattattttacttttctgttactcacgtttgggtacttagaaactggagaaaaagatgacaaacttttttttgggtgttcttttcgcttaagtaaatgcaatttttgagttagagtttttatttctggaaatgttaggcagtccccttctcttcattttatcaggaaccaaaaaaagttttaattttgctatatacatggggtagggttctcccttttttcccttaagggttaatttttttcactattttttaatctattttcctttgtgtttgaattgttatatatttaggggaacttttccggtggagcaaggggatattcacaaacgttggaaattggtcagtacgagattgaaggattttcataagtgtattgtgcttcccattggcagcctatccattggactttgcaggcatcg

SEQ ID NO: 14775 - DNA, 585 bp, Gossypium hirsutum
ttattttcctgcttccaggccgatagacttgcacataacatcttctcttttaacttgaagatcccaaacaattttgctcaatttctcctctaaccagccttgaagtcactccctccaggtattgttcctcaccattcttaagtgtttcttttgctaatcgatgggcttctgtgttttctatccttgggatgaagtagaaacttatttgttgaaaatgtgactttaagctttgaatatcacgtataattgctcctattgttgatctgtcgcgatttgcctcttgacattttgtgataaccgtcttcgagtctcctaatatgtccagtatatgaaagcctatgttaattcctaattttgttgcttggaatcctgcatgtgcttctgccgcgaacggagatgcaacattgtcatgaaagatcgattttgttgctatggttctgcctccctcgtctttaacaactaagcctgacgctgatcggaagtttagtgagtcaaaagccgcgtcgaaatatatagccacgttcgccctttgtatttgctgtttgggtatcgcatttacttccaagataagtgccttattcttga

SEQ ID NO: 14776 - DNA, 765 bp, Gossypium hirsutum
cgaggagacagcgcggtgaaggagcccttggatctgataaggcttagcctcgacgagcgtatttacgtcaagctccgttccgaccgtgagctccgtggcaagctccatgtacggtttaactttgttatgctttcattataaagttttagggttccctttacttgttcttttttaggttccgatttttactgttcagatgctcttagggtttcacattttagggttttcttgggttctgttaattctgctagtttaagttagcacattttggatattgcaatttttattttcgttatttatgaatttcagtcgattgcacagccatgcttaaggaatgcctaaacggaatgattcaaaattttgggcgatgggtatattttctgaattgtcagttttctgtttatttgcagcttcagaagaaattgttccgtggataaacatatgagtcagtttattggatggttgttaggtgtagaagcttatttgtgacatacagcactgataagttctagtctagtcttttagatcaccttttgtttttcatgtctgtgtctgaacttcaaaacaaagtctatgcttctggctgaggttctttggtatcaaatcatttttgaactttgaatggaattgttgtattgcttaaatccaacttcatcctcagtttttcttcctctcttctttcaaataacaccatctgttttaataataatttaaatattttttagttaaaatgtagtggtttgtagacaactagtgatattgggg

SEQ ID NO: 14777 - DNA, 760 bp, Gossypium hirsutum
tcgccgatcgacctctgcttcagtgactctcgcaaccactggatcgtgagtaaggtaagtatttcctgccattcttaaagctttcgatgctaggtcatgtgctttagcatttgctcatcttcttacataatggaatcgaatctcatggaaaaacttgcatagttcctgaatgtcttggatgtatgcgtatagtactgacttatctttgttcttgttctggacttttttgatcaccgtcaaggaatccccttcgataacaacactctgtaatcccagatcccttcccaagagaactgcctgtaaacatgcaacggcctcagctgcaaaccccgtaagtatattctcatgggttgtggttttagtgactaaagtttcccctttccaatttctgactatgagtcccgaacataatttcttcattttgagatctactgctgcatcaaaattgattttacagataccttggtccggtggcctccattctgcagttatcaggctaaaggcaagcttaccttgtttaacgttgttgagatcatgtaagtattttgaaacaaatcgtgctgtctctgctcttgacatttttttgccttaatgaatccatttatttctggccaaccagatagcccagatggtatacagaaaagaacgacagatatccattctgctatttgaaacaatccaggtaaaccactccataaattccagatctactaggtttacaggccaaataaagtttaagctattccatgtttcttttgaa

SEQ ID NO: 14778 - DNA, 791 bp, Gossypium hirsutum
tggaatccagcttcttccttggacccattgcatgacttcactctcttccaagctttataaacccctcctcttttcttcttcttcgaaacttgtacctttctcctcatcctctctttcatcttcaagtacaagggtttcttcaagcaacagcctcaagctctgtgctgctcctctcgaggccggctggttggattctttgtcttgcccttcccctcacgccgctgctgacgatcccacccggcccaatgccgattccacttgggttatcggtattgaccctgacctctctggtgccttggccctcttgaaaagtgactcgtctggttcctctgctcaggtactttttgctagcacttcaaatatcactttttttcttgtcagcttattgctaaaataaaattctcgaattacctgttaattggtgcaatgggttaggttaggacatggcttttcttatgttaaattgtttgatattaggtatttgattcgccgcacttgcctgttcaagttggcaacagagttcgaaaacgtttagatgcacggtctattgttcggttgcttcaaagtttggaggctcctattggtatccctctctaaatctctctctttgtgtgtcgattcagctccacttttgcttgtgcattgattgagctagtgttactccaggtactgctgcatatatagagcaatctgttccctttccaaaagatgggaaacaggttagcattgttaccataactgaattttgttggactctttccaatcattttcttattattcctgtttgtcat

SEQ ID NO: 14779 - DNA, 582 bp, Gossypium hirsutum
gtgagtggaggtccgatttgctcagattagtgctaaatctcaaggcctcccccttttattcccgaaatcccctttaaacttcgacttcgatgaagaaaatgggttcgacacatcaaaaacaaactaaaataaaagaaatagccaaaaataaaagaaataacaaatcaaagaataaaatcaccttctaactttttgaatccttttttgatttcgtatccaatccccttttgcagattacattcggccttttatagccaagtgaaaaaaataataataataattacagaacgatttttcttttctgttatttctctgttgctgtggcttgtgggcttgctgcaggtatagttgtgcgtggagaaactgctcgtgggcaatggcgcgaaggcttccagaagcttcactgtttgggccctatgagcctgctttgaaatcggctggttggaggctgttgtgaaggccactgctggttgcttgcggcgcgaggggacgttcgtgggagctgcggcactgtttggctagggtttcagtttctggaacagaaattttgggccattcgggctagttttgggattgggccta

SEQ ID NO: 14780 - DNA, 730 bp, Gossypium hirsutum
  misc_feature (717)..(718): n is a, c, g, or t
  misc_feature (721)..(722): n is a, c, g, or t
acgagtcgagttcgaactcagattacccaaaatggcattcacattgaggagtgtgaaagtaccgcccaactcaacgagtttggaagaagcaaggagccgggtcttcgatttcttcagaaaagcttgtcgatcaatccccactattatggatatctataacctagacgacgtcgtcaccaaatccgagctccgttcttccatctcctccgagatccgtaagaactctcatgttactaaccctaaggtctgttcccctatctctccgttttagatcctttttatttaatttactttttgatttgttaaacttttgggaaattgtatctttcctagggttaggaaaatattgtattgcttgcacttaatttctggaaataaataaaatttatagctaatttgaattaagagaaattgaaataatgaaaaataagattattcaaggaatggtcattatcctattgaaatctgagtttaatctaagcttagttgatgtaggattgtgatggaaaaggttggatatttttatttttttattgttttggggaagtagtttcgatttcgatgtctttatatttaacgggaatgctaaattatgcttttgaatcagatttatttcatgagttgccttcattttgctctatcctctgatcaagagggggactggaaatgagatttaagaagagctttattgatggtatattttcgaagattaatttnnagnntactgatg

SEQ ID NO: 14781 - DNA, 771 bp, Gossypium hirsutum
aagaatggatttttacgaatacccatcccgtttttccctcccttcactttctttgtttggtgatttcttcgaaaaggttaaatatttttgcaatttcgctgtttctgccatcattgggaacattttctctgcgatcttaaccttcttctttgcattaggttggtttccttctttctttctttcttcctcttttctcctctattttgcttcattaaagctttttttcattgcaacccctttgattattgatctattcattgctaaaattttggtttttatagtaattattataatttcgccattgtgattatatgaacaaaatataaaatctgattatgattttgttccatttatgaaaatgtttttgcgtgctgacaaaccggttgggggattaatttgtcagtcatatacttatttccaatatagaccttgaattaatgatgcttaacatgtaaaaggctttgatgcatcaagttagccaatatacgctcaaattttgctaaacaagttcatttgcagtgggcaccttgttaggggccatgacgggggctttgataggacaagaaacggagagtgggttcgttcgaggggctgcagttggggccatctctggtgcagttttctcaatcgaagtctttgagtcatctctagttctttggcaatccgacgaatccaggatcggatgcttactttacttggtcagcaattgtgcttattcccctgtttttataggtttacttgctaggcaatctaaattatttcttttcgtgc

SEQ ID NO: 14782 - DNA, 587 bp, Gossypium hirsutum
tcaaccacccctctctttctacaacctccatcctcaccaccatcacaaccaccatgtacccacctctttttccctcgccaccgtccacggctgcccaaacttgactgcaccaacagcagcacagataacagcagcacaacaagtggcaacgacacaccaccaccaccaccaccaccaccaggagaacctattcaaatccggtttaaaagaggttcaagacggcgcagacagctccaagaagatgggtttggtgtacaaggacaaaacatgaagaacaacaaggctgcaattgaacaaccggttccaaagaaatgggaagaaaagagcatgacagagaaggcattagacttgtacgttggggaaaagggtttgctgttttggctcaataagtttgcttatgcttccatttttattgttattggtgcttggatacttttccggtttgttggaccggcacttaatctttatcaacttgattctcctcctttgcctcctacctccatgtttaagggctcttgaaaggataccatagtgctttgtctttgtattggtttgttttgtagcatcttgtttagggaaatggagca

SEQ ID NO: 14783 - DNA, 793 bp, Gossypium hirsutum
  misc_feature (771)..(772): n is a, c, g, or t
aagactctcctaatgcaatctactaaaatcaatctcgcaaagactccacccttcgtcgatcttcattcagagcttcttccacaccagaagtgagcgtattctgcagataagttgtctccttcttctgtaaaccttccttagcaataagatgagccactttgtttgcctctcttgatacaaatcgaaaaacacaggactcaaaaccgaaacttagatattttgaatcttgtataaaagcttcgatttttgatctgtcatcgactttctcttgcagtttccgagtaattattcgggagtcgccttcaacttctacctttcgcagcctttgaagtatcccaacatggattgcctagaggcacgccatcgcttcagcagcaaaagtagaaggtatattcttatgaaacactgttttagaaaaaatgacttctgaccttgcgttccttgctactaaacccgaacaagactcctttaattcctttttgaaatcagcatcaaagttgatctttacccaaggatccgttggggcatcccatcgactaataagaacctgcatcgttggtaagctcgaactcaacccatccagttctctgatatagttcttaataaaagctgttgtttgagacccagactttagatcacctttatgtataaatctgttcctagtattccaaagcacccataaagcacaggcaatcgtcctgcactgattaaaagaaaataactcaaaaatgttattaagccaatcactaaaatctgagttatcctcttgannaggccagttaaatcctatcgt

SEQ ID NO: 14784 - DNA, 588 bp, Gossypium hirsutum
aagagagagtcactccaccgccattgcaaacgaaacctcgaatgccaccgagcaagcttacctcaaccgatctccaatctccactcggacaactcgcttctcaactcaccgactccgacctccgactcactgcttatgacgtcttcctcgccgtatgccgtacttcctcttcgaaacctctctcctcttccgcttccgcttccaattctgattcgctgggttacaactcgcctagtcaaaacaacaaccactcacctaattcgcccgcgttgcaacgctcgcttacgtcagccgccgctagtaagatgaagaaggctttaggattgaagtcgccaggatcgaaaaagagtccgggttccgggccaggctccggcgagggcaaatccaagcggcctacgactgtaggggagcttatgaggattcaaatgcggatacctgagaccgttgattcacgagttagaagagcgcttttgagaatcggcggcggcctggttagttaaaatttgagttttcattttctatcgagttttggttgatccgcaattttgctttttttcttttaattgcaatttacttgatccaggataa

SEQ ID NO: 14785 - DNA, 670 bp, Gossypium hirsutum
ccttcagataaatcaaaataagtaaaagaagaaggaacaagtgctttgaaatccaaacttgagattcagcgaaccttctccacattcaaagcaaatcaaagggcacattgatgactttagttccaggccaatcgacccttcatcgccatcgtctgcatagaatctggcactccatcatcccagcccccaaaagcctgtcttctcagaccttccaagctaacgtgtgcgccgctccattcaccattcgaggcccaaagaggtaggaaacatcatcaaaaccagtttctaaaatattaatatgatgtgtgatcggtctaaggactatcatcctgtcttttcttaatactcttgataaatgtcagtgaatcaccttccacgatcagtcgtcggaagcccatagcacccgctaaaagtagagccctttcgcatgcccgtgcctccgccacaaaagcatcaaccacatccttaaaaagataagtctccgcccccacaatttctccttccgaatttctagctaaaactgatgttatagcgattctatcaacactatgaaaagtcgcatcaaattttaacttaataactccagtgtctgggggtttccaaatttcatttgctatagatctaaaggatggacagaagttctattgattaagaataagttcttgattat

SEQ ID NO: 14786 - DNA, 717 bp, Gossypium hirsutum
tggaagagagtaagagccataaaatccaaccgcaagaagagtttcctcaagtcccatctgaatcccagcctcggagaggacgtccgaagaaaattgtgcttaaatcggtaggagatgttcctttgcctaactggttacaagtgtgatatcttaaaaaattttaactacgtgtttctcattttccattcaggagcttgaatcggattatgagctctccgcatcagaatcggaagatgggcgtaagagaactaaacgatccaaaacagcttgtgatcggaggaagcatcaaaagatgtggacccttgtggaggtgattaagcttgttgatggaattgccaagtacggtgtcggaagatggaccaatataaaaaagcttctgtttgcatcatccacttatcggacacctgttgatctcagggtacctcctgctacaatttcctcttgttttttgaaaaactcgaatacttttttaaatacatatgttttcctacaggacaagtggcgaaatctactacgatccagttctgtgcaggaaaacaaccggagagaggttagctttcgggtttttctccattttcactttcatttgctttttcagctcaatccaaatgttcattgcaggttgagaatcatccgaagcatgccgtacgtcccttaccaaagcccgtggtacgtcgcatccgtgaactggcaaccattcatccatacccgaaggtt

SEQ ID NO: 14787 - DNA, 805 bp, Gossypium hirsutum
atctgtatgagatttcgatttctaatctgtcttccttttctttttacagtttctgaattactgatcgcgagtcactttcaatctcatcctctctcaaccctagagataactgaagatggacgcctagagacatgccatcgcttccgcagcaaaaacagaaggtatattcttatgaataactgattttgagcaaatcacctctgccttagtattccgtattactaaccccgagcatgactctttcttctccttgttaaaagcagcatcaaagttgattcaaacccacggatcagtcgcgcgacccatctacccgtctgaagtcgattcactggtaagcgcatactcaacccatcgagttctttgatgtagtttgttatgaaatttgccatttgagtcccagattgttcttctctttcatgaataaacctgtttcttgatgcccagatcacccacatagcacatgcaatcactctacacttgttcaaagagtttaactcaaaaatacatataagcctatctttaaaaccagtactttccccaagagtaggccaattaaagcctaacttttcccatgtctcctttgcaacagaacactccctgaaaacatgctccttcgtttctgtcccattttggcacctttgacaagttgcggacgccatcagtcttctataatgtagattaccaaaagtaggcaaaaaattacaagaaaacctccagtttgtaattttaatttttgaaggtagatctaggctccacaatcttttgtaaaattgtttgtagtctgtttgcatttgattctactcat

SEQ ID NO: 14788 - DNA, 756 bp, Gossypium hirsutum
tctcgactggtaatcgcgctatctctaaaccctccttctcttcttctttcttcttctgaatattttcccttctttcattgcttgggaaatgaaatgccgtgctcaaacatttaagtagctttagctgcttttggctattgcaatgaattcaaactgtgtttattaactgcccttcttcattcgtgggttttcttttaaagattatatcacattggcttttcgattttatatgtatcgttttcgttttaatttcaatttttctaacttcattaattttataggtttttaaacccttttttaatttcatttgcagtaaatcttggtcttgagatatttgggattatcatgaatccgttttatatatattttactgctgaatcatgctaataaattatgtgaaatttgagaggtttttgagtcctaagttaaagaatcatttatatatatctgctaatgtttgaagcatgagttgaaatctaaatgaacggtaatctagatttgatagcttattgaaatgccgctcgaatgttgtgcttttcattctatttatcatgatttttttgtttacttaagcaggcatggccaccaagcagccaaatacaggcctttttgtaggactgaacaagggccatgttgtaaccaagaaggaattggttccacgtccatctaacagaaaaggagtaagtgcatcctatgcctaattaagttctttttttgtagaacaatagtaaacgattatatgtaagagtcctttgc

SEQ ID NO: 14789 - DNA, 789 bp, Gossypium hirsutum
caagaatccagccatggggaacaccgagaagctcttgaaccagatcatggagctgaaatgcacgtccaaatcgttgcaacgccagtcgaggaagtgcgagaaggacgagaaatccgagaaattgaaggtgaagaaggcgatcgagaaaggtaacatggacggagctcgtatctacgccgagaacgccattcgaaagcgcaacgagcagatgaactacctccgtcttgcctcgcggctcgatgccgttgttgctaggcttgatactcaagctaagatgactaccattaacaagtccatggctaatattgttaagtcacttgaatcttcattggccacaggttatttctcagtacttttgtatcattgatcatctttctttttcgtggctattcatgatgataataaaatttaggagaaatcaaatattacggagaatttaggttagaatctatgaagcaagaacacttttgttaggtagctttttggaacttggatttcaaaaataaagtaaattgagtagttatttctcaaatctatgatgataaattcgtgtttttatacttttcaaatacatattatattgaatcacatctaatttgtctgtaatgcatgcatttcataataaatgaaattcaaatccgaattttcaaattcatgttaccgaagggagcattaagggagtgttctagtatcggatatggatacatcctcaactcggcgaaatacatattggaatattggacatggttggtaatgttaaaaaaataaaaaataaaaccggacatggtc

SEQ ID NO: 14790 - DNA, 595 bp, Gossypium hirsutum
aagattcttttcttactaatattttctttctgttctttcattttcccgagaaaatatacttatcgtttcaaaacaaagatgttggcatcgtcagaaaacctagcgaacatcgaaacgtcgacgtttcgttccctcttcgacgatccttggatctccgaatccttttctcgcgacacacaaactttgacgatagcgttacaaaagtcaatatccgattcctgcaccggctccatcgcttcgccggtgcctgaaccggcacccaaacagtaccgaaccgccggtccaccgcctaccgggaaagtttccaaacgtaagcctcgcgcctcgaagaagtctcgaactacctttatagcggcagatccagccaatttcaggcagatggtacaacaggtaaccggaattggatttggtgacggaaagatgacgactgtgagtccgatccttaaaccggagcctcaaagacccggcaaccggttacctaacggtactgtgcctggatatttacctacgttggacacttcggcgttgttattggatcatcaccagctgcatgagcagccatcttttgacactttcccgaattttcccacattag

SEQ ID NO: 14791 - DNA, 794 bp, Gossypium hirsutum
  misc_feature (781)..(790): n is a, c, g, or t
ttttatttgatataatccattatacaacgaaatactccaaaatgcagtcagcagcagcaacagcaacagcaacagcaacagcaactctcagcattgcaccaccccttattcctaatctctcaccctccaaagccttctccccaaggcttggcagctccattcctccctctcggcgcggcctttcaatcaaagcaaccgccaccacctacgacccttcaatggttgactacagctctatgctctcgtaagtcttttttttctagtttaaagttgtgttgtttcgtttgacacgaaagcttttaactaatttgggctcgtggggcatgcatttatgcagtgtgtttccagcagaggcgtgtgagacaatcggtggagatgcatgccgggcagacatataccctgaagtgaagctacaaccggaggccagaaacaactccccgaggaccacaacagagttgatggacagagaatatctggaatacaatgatgccaaaacgtattaattactttctcaacaaactattgcccaaatctcgtattctatttctttatacaaattaagttatgaaagctgtttcatttccatatgtaaatgcagggttttctgtgctgaggcgtgtgatgatttgggcggagaattctgtagccgagagtatcaaaggggagtgtattagaaacaagtgaccatgtcgccaggatccttttcagctatcaggattcaggactggacatatttatattgaaatatgcgatgtatataacagaccttttacttgctgtnnnnnnnnnnaaaa

SEQ ID NO: 14792 - DNA, 735 bp, Gossypium hirsutum
tggcattcgatgacgcttcagcgacggcctccgcttcctcagcggcggcgtcctttagtagtccaatcctttaggcggagcgacttcgacaccttcgctcgccgcgtggcctccggcgaggccttgaaggacgcttggcgaacggccaacgaccgcttcgagcaattcgtcttcgaagctaaaaaaaccgctgaacggttaaaccgccagtactccgtttccccccgactctcctccgtcgttcaatccgccactgaccgtgctcgtgagctcgaccgggagctcgagattggtatccgttggcgaacatttacgatggattttcgtaggaattggcctagggttcgtgttttattttatttcttggtctagaattgaacttcttttattcatttggaatttttatactaacattttgtttgaggattttttggatatggttgcagtacaggaagcagctgaatgatttcttagaaactccattaggaagaagttttgctgtaagtaagattaggccaaatatcaattttacttattttcttgagttatttttgtaggctccatttctttgttacttgttgctcctaaaagaactccaataatgcaaaagaaatagcgaacttcaaaattatgtactaatttgataaaaagaattgtgtaatttgctattatacaaggattaatccaaagattgttctttaatttgaagtaaagtcatgcatttttatttccatg

SEQ ID NO: 14793 - DNA, 775 bp, Gossypium hirsutum
ttgtctaggagcttttcatttctgctatcccttcctcttcagatttctctagatttccttcaattcgggtttctcaaccatctctcctatcttctgcgctgaaggcaagtgaaggctgcttcctccaggtatttttcctctccttttcttaaagcttctgttgcaagttcatgggcttgaccattttctgatctattaacaaaatggaagttgctttctagaaaaaattgtttctttctttgaatatctcggatgaccgcccttaacactgacttgtctgttgctgttgagttgcatttttttataactgttttggagtctcctattataacaattgattgaaaacccagtgagatacctaacttcactgcttgtaatcttgcatatgcctccgccatgatcggggacgatatagcggagtggagtactatttttgaggctagaaactcatccatctccccccgcacaaccagggccgaggtcgatcttgaatatttgctgtcgaatgctgcatcaaaatagatagttgctttgacatttcttgtgatctgtctctgtcttctgttatcacctaaagtatgtggtttttcttccgatccatcaatttttgctatgtaactttgaactctttttgataaatctcgtcctgctattgttttcctctcatgaacaaactggtttctagagcttcatataatccatgcagcacagcagaaaaaggcgacattgtttactgttacttatggtgaaaacccaggtaagccaatcccacaga

SEQ ID NO: 14794 - DNA, 790 bp, Gossypium hirsutum
tatttacttcactactttcttcctaatttctctctcccgattggactggacttgtcatatcatattttttgtacacttctcaaatccctctgtctcctataattgattcatataaaatacaagcaatacccaataattttcttgttctttgtcgtcctaccatcttccctttcttgttactattcttctcctcttcaaccttgatccatttatgctactctttctttttcttttccttcatttgttgttgaggaacattatatagttaggagaaaaaaggtattgagaaaccaaaagagaggggaaaaaatgtcaatgggcttgacatctgaacgtgtttggtatgttcactgcaacttctgcaacaccattttagcggtactgcactgaattccattacaatatatttctttctttcttcacctctcaacgtgtttgttatgttcactttatttatttattttaaatgtctttcctttctgtaaaagtgagttgaatttgccatgactggcttgtttctgtttgttgaaatagttttcgttattttctcgaagaacaaagtgggagatttttcttgatttaacctggaaaatgccccaaaaaatccacgttacctacatgattcatggttgatggatcgtgagatttttcttgattttaacttggaaaatgactaaaagcaacgatctagaattcccatctaaaacaagcacaagtgttgtattcggagcgaagtgaaagcattctggacggccctttcaaagtttgatctctcatgagcaagtaaatg

SEQ ID NO: 14795 - DNA, 501 bp, Gossypium hirsutum
gatggccatgacgccacaaatggcttaataaataaatcccacacccagttggccaaagctttacaccgaagaagcaaagcagcatcggcatggcagtttattgcaattccgctcccttttcttgcaaagcctcgagaaacagagaccccacacccttatccgcactcttacccacccgtctcttctcacttcttcaacccccaatcagcttccatccagatagattaaagctctcaacttgcaggtatatatatcaacttgcaaccaagaagtgtcattctttctgtttggttaagtgcatgctttcttttttaattaattttcgatttgggttggttttgcaggtgggataaggtggcttctgctgttgtttctgaagaaagtgcagttgggtcaagctcttctgggactgatgtattcaacctcacttacctagaggtgggttttattattattattattattattattgtaaattcagttatattgaaactttttttt

SEQ ID NO: 14796 - DNA, 765 bp, Gossypium hirsutum
cttttctttttcttctctctaggtcaccaacttctctcagctcttattcatattcatcatactttattctctctttttctttccgttaattttacgttgctgaggaactcaacattcatttgtatagcttccagtgtcaaaatagctaaaaaagatctgcttgttttgctttttgtttttccaggaaagctaaatctcggatcccaatttcagctcaaaaatgtcggggtaagtggtaacttattccttatataaggattcaaggcctttttagtcgaatattagatttattcccgttaaagtgagtctctgtgttgggtttgttttaatatctccatacaccatgtgacttcaagttttctttagtgtggagtaatttgctatggtatttattttatgttgataaacgttgcagtgtgttttgttttagatgatctggctagttgtttcaattgttgcttgtgtccttccttttttgttgaattttgagtgatattttaggtcgcgtagcctatttatggctgcattcataggagttggatgcagtatttcaaaattttcccatcttgtaattaagtctaattgggatttgtgttgcttgaactctcttgtttaacatataaatatcaggatatgacctccaaggatcatccaaatacatagaaaaacttcgaaaatttaaccatacccctgtaggatatatacctgcctatgatgctcatgcccgagtaagatagattggatttctgtctgattttttttttg

SEQ ID NO: 14797 - DNA, 759 bp, Gossypium hirsutum
ttcttctaaaaatcacctaatagctattcaggggaggaggtgccgaatggctattccaacctctccatcgaatgacccttcttttccctccgaaaataccctttcttagactgaaatttctcaacggtttcaacttttttttcttttggtcatttgacaatctcaagctcaaatcaatcttaaaggaagcaaattaacttgaaggccaaatcaacttgattttgttgtaagtacaattcaactagggtttgttttgcattttgattgattttttttgtttctgatgatttgtctaaggggaattgaaatggattttgcaactgttcacgaggtgatcgattcattcttcgagtcaacttctcctctcaaagatttcgataaaatcatagacaaattgaatcagttcatccaatttgattcttcttcaggtagagtacctgaagctaatcgattctgcatatgttttcccctaccggatatttgtttgtatatgtaaatagtttcgtatttttcaggagaaggaaaagggagaagggttgaggagctgctaaaatgatgcccaaatcttaagaaaattattattttagggttatttcaaaagctaagccacacaaggaatgccaggtattggccaaattcatctcatctattatttgattcatgaggaaatacatgcatgtagatgtgcaatttgaatgagtaaagttctatcaattgaatttttaaactcaattcttgtatcagttgtaaattatatga

SEQ ID NO: 14798 - DNA, 789 bp, Gossypium hirsutum
  misc_feature (776)..(776): n is a, c, g, or t
cccttccgttctctttcttcagtcgctcggcataatccggaactctaccaatcaggtaaatttcttctttttcctttaatgcctccgttgcaagcatatgagctagactatttgcttctctaggcgtgtgctcaaaatagtgtctttttgattgtattagtaactgatgaatatctcgaatatatgctccaacccttgatctgtcatttgcttgtgttttgcatttcttaatgattgaaagtgcatcaccttcaataataatatttggccattgcatgttcataccgatgcgagttgctgtcctgcaagcaattgcttctgcagcaaaggctgatgctacttggtgatgaagctctataatagataaaagggcgcttccttgactgtctctggccacaattcccactgccgattgtcgcgcgttttcatcaaaggctgcgtcaaagttaatctttataaagtgaccaggtgggtgtttccatattctaccttctttaatactttttgtagctttttctttgatccccttgagctctgaaatatatctctgtacaaaacctgcaatttctttcccagatctactaaccttctcatgtactcttttattccgctctccccagattgcccaaagagcacaacaaaataccctacgcatattgggattattctgatcgaaaacccaggtaagccactttaaaaattccatatatggttcatgtaaaatcttcgagagtgataactcttcccatacttctgttgccacaggacactcacgnaaatgtgatttgt

SEQ ID NO: 14799 - DNA, 755 bp, Gossypium hirsutum
agactctttcttttagtactcgaaaacacaagaaaagatggtctcatttttaaatgttagaggattacagtagtcaaactttgcttatgattttagcttagttagggtccgtttgtttactaggaaaacatttcccagaaactgttttcctaatttttcggtgtttgtttgaccgaaaacattttacatatgtaaaagcttttcaagaacacgggtaaaatgttatgcttttaaggaaaatgtcttacagatttttttctgtaagacatcttccaattctcaccaatctttcctagccgttcttcatcttccttcttcttcatccaggtaacattcctccttctacttcttcttttcttcatcttttatttctatttttccttagctgtgtctgtcctatatcttctcttctcagggctactgtttcgtttcactcaaatcttcctcttcgaagggtcttggcttaaggtatggcatctttttatgttcattttaaagcattttttttcttgttctttagttgttcactttttaacatataatttgggcaattccctagaattttgattttactttttatactgttgaatacccttttgttctttgtgctaaattttgggttttatctgaaagtgaagtagcgttggttatgttgaaatttcgattcatttgtttgaaattttatgtctttctctgtttctttatttttaatttttgatgttgaaattttgggtttttttttgggtttttatctg

SEQ ID NO: 14800 - DNA, 570 bp, Gossypium hirsutum
ttagcattcttaaaaaatacaaaataaaaatagatcaagaaaccctaaagacgtaactctctcatttcatttcttttgctgcgccgctgaaattctttttatcgatggacctgttaaatcacatcctctgttcttcgtcttggctttgtttccccgatctgtcatcttctaagttactcagagctttgttacctgtcttcttctccagacttagtccaacaaacctcggcacactttctctaatcaagtctcctttggtttttaataacgatgggttgaacctccaacggagtttcttccacccaaaaagtcaaaaaataacttcctcagccccatgtggccatcgcatgcgccgttccattggctttttacagtatgaaccagaattcaatattctataaaattcttgattttgctattatttcatttataattcccccaatgactgatatatcatttccatgtccatggttttgcaattttttaatgataatctttgagtccccttcgatgataacatcactgaatctcatttcttcagcaaaaatgactcattagaggtatgtatat

SEQ ID NO: 14801 - DNA, 782 bp, Gossypium hirsutum
tcttggtctctcctctccaggcaagaacatgccggtccagatctactcctatcaggtaaacgttttcctctctgtcaagagcactttttgccaacctatgtgcatgcgagttctctgatctattaatgtattgaaattttagttactggaaacatggtttcttattatggatatctctgataatagccccaatcactaatttatctagtgaagctttcaacattttttaataactgttctggagtcccccatgattttgattgataacattcttagtgagattcctaactttatactttccaaacatgtgtacgcctctgctacgaacgaggaagaaacattgttgtgaaccaccgtcttaagcaccaacaaatcccctttttggtcccatcctaccagtcctgttgctgacttggagcttcttctgtcaaacgctgcgtcgaactgaatcgttgcttttggtaagtcctcctgaatcctgcaacttctgatcgtagtcttctgtaacttcattgctctcactccttcatttctgccatttgtctctaaatgctttgtgctaaagcccatcccgttttgtttttcccttcatgtataaactggtttcgggaaatccaaatcgaccataaagcataacaaaaaagtcgacactgagcatcagttcctttcttaaaaacccaagttaacgaattctaaacttcttttgttatagggcactctcaaaatacatggaggctttcttcaaaccaggaccggcaacgagggcattcatcatttgtaat

SEQ ID NO: 14802 - DNA, 728 bp, Gossypium hirsutum
ttcaggcccaatacccaaacttcatattttcctctagtttttaagtgtctctgaagtcttcacgctctccctctctacaatatccatctccagcagctgttgaaaaaggaggtgtgttctttatttttattttttttctcatgtattttccttattttccattttacttccaactccaactctcaagcttgtagacttaattgagttattcaaagcctctacctttaagcttctgttcaattttctttaagattgtcaatctcttctttgatataacaagttatatacatgggttaaaagtgatgaatttattaatgggtatttagctttaatggataaaaccaacttcttttcttagaaaatgtcattttcaattattgaggtttgctttctcaaactgggttatgtttaatagttgtatccgactgttaaactatgcaggcaattttatggagctatttgttttatgttatttgtttttttttcttctttaattgttttgtttctatgggttacctacgatgccttgttgttgaaagcttgaaaacatgttcaatttgaatgaacatgagagtggaataagaaatttacaaattcagttcatcgttcaattttggatatcaaacaagttgctaatgtgaaatgattttgcctagagtttgaccatactttttaaaccttagtaatacttcataacctaattgtactgcattgtgctaactacgttc

SEQ ID NO: 14803 - DNA, 412 bp, Gossypium hirsutum
acgctactgctcccggctactcgctccggtatatgtgcggtggcggtgggtcccctccgaccatcgctcactctctctcctccaaattttctcacttcaatcaaaactcggaaaccaaaacctccgttgtcccctttcgcatcttacgaccctcttaatgttctaagatctacgcttttttcgcccaaagtctcttcgtcctcagtttcacccagttttacctcctctaatgatgatactgacaaggcgaagcttgctcaggtactccccacccctcactctccttttcttattctcagattttacccttttaactgttgcttttttttatttgatttgaattgtttggcgctgaagcttcaactttattggattgggtttctgctctttggtttaacttgttctatttttt

SEQ ID NO: 14804 - DNA, 592 bp, Gossypium hirsutum
aatctgcgtctattagcagagacgaacagccccgggcttcaaaggatgaccatttcggctgtgggatcccttctaaaccccgacttcgacgaaatgaaggggaaccgatggccaactcgtaaggtaaacctctcttttgctttctttttttgtttttgagatagatttcaaaataaaaagaaaatagaggtgtaaaaatgaaaacagggaacaacctttgcagaatattccacttctttgtatttgattcctctttttttgtgtaatctgttcatagtctcctttttacaatcaaaaatcaaaggctttatagccgaataactaaagaaaacaacaatttttgtcctttgcttttgtattggcttgttgctgcttttgtttgttttcttttgcaggtacggagcacggggctgtgcgttggtgctcgggtacgggtctaggctggagtacggaggcgcgcgtacgtggctgctggagggtacggaggccaaggctggggcttggctgcggctcgagagagagaaacctagggttctgttcgttctaaaaattttgggccatttgggccggtgtacttttggggttgggtcta

SEQ ID NO: 14805 - DNA, 587 bp, Gossypium hirsutum
  misc_feature (583)..(584): n is a, c, g, or t
gttctctctttatctcccaaatccccactacaagctaacaataccctcttactcctagtactatacatatatattcaacttcaactgctctttttcactgtaaaagctctatatcccaataccttattgaactttgagaattgaaggcgatggtggactcagacactgagtcgggaggaggtccaaacaacgcatccaacgcagatctttcttccccgaaagagcaagacaggttcttgccaatcgctaacgttagcaggatcatgaaaaaggctttgcccgccaacgccaagatttccaaggaagctaaagagaccgtccaggaatgcgtgtcggagttcatcagtttcatcaccggggaagcctccgataagtgtcaaaaggagaagcggaagaccatcaacggtgacgatctgctgtgggccatgactaccttaggtttcgaagattacgtcgagcctttgaaggtttacttgcagaggtttagggagatggaaggggagaagaccgccgtagcacgtgataaagacgcgcctcttgctggaggcgtcggtgctgctgctcctgctggttctagtggganntat

SEQ ID NO: 14806 - DNA, 672 bp, Gossypium hirsutum
ggcaggtggtggattaccttctattgttatcattctttagcatcacattaacagctcagttggacatccccgagtccatcctcccccacgcctacaatcccttctatcaagtttataccacgttaacccaggattatttggtgcttgagcagcctggttttttcaaggcacttatgacgttggaacttgtttaccaactccctctcgctttgcttaacatctatggattgttatactccaagccctggttcaacaccacctgcctcctctttggtgcctctatcgttgcctctacggtaactaaaataattttctttctttctttactatgcaaattaattttataaacatgatccctttcgttatacttatatttgaattccgttctgaattcagacagctatggtgggagacattctgaattcccagaaggcatcagccaatttgatggccatgtattatccaccgtttcttccattaggggttctggctatagtgcgaggggtggttggactatcgagcaaggctgctccatccattggcaatggaccttcgtcggctgtgaaaaagagggcttaaattaagttgagccccgataggtttcaaacatcttctttaagagaccatactaatacaataataagggagggattctattctgttttatccgca

SEQ ID NO: 14807 - DNA, 576 bp, Gossypium hirsutum
cttcggaactcaggggaatgatgaagagaaatcaattaaagctttagttgaacattgtccaaagcagcaaattcagtgcctacctgaaaatgagtccatcacttctagtctttctccgtccttgtcattgaatggtagtttgcattcagaaattcctggacttaaagttgagtcatctacaggaatgaatactgatgctcaacatcaggatggtgatgtggttagtttaaagtccaactcctctctttctgaggaagtttccttctgtgaaaacaattcatgtttacagattgattcagaagttatccgaataaatggtgatgatatggataaggttaattctatagctgtgagaggaaatccagagaatatggataggattagtactctgccatgttcaactgatatgaaggggatttgcaggtctgacaaagatctatttgatgcaaccaactccgaagatatataaaagccaaaagtgcgaagacaattgatgcaaagcaattttcatttgttccaagagaaataaatagctgtgagctagattcgcaagtatcaactagttatgtgatgaaa

SEQ ID NO: 14808 - DNA, 588 bp, Gossypium hirsutum
tattgggagaaatcaaaaagaggagactcaacccttttttaaatcgatttcggagaagacgaggctctaacgatgaacccataggtgagtaccttccctccttttgtcttttacatgcaatgaataaagattgaggaaatggaaacgaaaataaaagaagaacgagatctaaaatcaccttaaaaactaatttcgaattgatttctcttctttcaatatgcatgtgttcgtttttttcctttccatatacaatcggcccccatttttatagccgaatacaggtaaaaataaataaatacaaatttcttttattctttctgcaatctgctgttgctttgctgttgtagttgttagtttgttgcaggtgtgtccaactagaggaccaacgtggaggtcatggaggcgcgaagaaagccgtgcgtggtagctgcggcgcaaactgctttcagaaacccttagggttgctggaattttgggttattggcttgggccatttgggccggttacggagttggggcactataatttggtctatttggggttttgggtgttatgggattttgggttttaatttgggtctggtatatt

SEQ ID NO: 14809 - DNA, 578 bp, Gossypium hirsutum
ttttccttttattatctactcctcacgttttccttgtttcttcaaaattccaagatctcaacttttccttcaaaagctgcattttgtattaactaatgatgatgagtagggttccgaaaccaaagccaagaagatctaccatgtccttatgtcacttctgcaaatcaaagccggctgttctgtattgcagcgctgactctgcaaggctctgtttgttctgtgaccaacaggtccactccgccaatgccctctctcttaagcatgttcgttcacagatctgtgacggctgcaaagccaaaccagcttcttttctttgctccatcgataaccttatgctctgccatgactgtgattggagctcacatagcaacaacaacagcagcagcagcagcagcagctcctgtgtttcggccatgcacgagcgtgctcctgttgaaggtttttcaggtcgtccttcggtggttgaacttgcttctctttttggttttgacttaaagccaaaagatttgatgaacttgatccctgggttttctttatacgagcgagaactaatgaatctggaagattttatggtccct

SEQ ID NO: 14810 - DNA, 575 bp, Gossypium hirsutum
atattttatttctctaagctaaacagattttgtcaaatctcgaaatcatcacatcaatggcccgtacaaagcaaacagctaggaagtcgaccggtggaaaagctccaaggaagcagctagccacgaaggccgcccgtaagtctgctccggcgaccggcggagtgaagaagcctcaccgtttcaggccaggaaccgtggctttgagagagatccgtaagtaccagaagagcaccgaattgttgatcaggaagcttcctttccagaggctggtgagggaaatcgctcaagatttcaagactgatttaaggttccaaagcagcgccgtcgctgctcttcaagaagctgcggaggcttatctcgtcggattgtttgaagacactaacctttgtgcaattcatgctaagagggttactatcatgcccaaggatatccagcttgctaggaggatcagaggtgaaagagcttagatcgtttgtatttacttgattgattgtgaaattaggttagatctagtgtttggtatccgtttttggaatttgctttttcgcaaaagtccttatgtaaacggtcgtctt

SEQ ID NO: 14811 - DNA, 737 bp, Gossypium hirsutum
ctttcaagtggtacatacatggctctacaagctgctgctttggttccagctactttctctgtaccaaaagaggtttgttttcagctttgtactgaagaactggttcttgtttttttctgattcaatttggggtttttgacattttgggtttctaatttgtagggaaagtctggtgcttctttcaaggactcatctctctttggagtgtcactttctgatcacatcaaagctgacttcacctcttctgctttaagatgcaaggttgggattctgtgttctttaaattggacaactatggtgtttatgctgtttttgtgcctttaattgagcctttttcctttgtagagggaattcaaccatagaactggggctgttagagcccaaacaacagccactgcaacaccagcaatcaccagatctacagtggatggaaagaaaacactaagaaagggtagtgtgatcatcactggtgcctcctctggattgggtttagccactgcaaaggccttggctgaaactgggaaatggcatgttataatggcttgcagggactttctcaaggctgagagagctgctaagtctgctggaatgtcaaaagaaaactacaccattatgcatttagaccttgcctccgtcgacagtgtccgacaattcgtcgatagctacaagcgatcaggccgacctcttgatgtacttgtttgcaatgctgctgtttatcaaccaactgccaaggaacc

SEQ ID NO: 14812 - DNA, 777 bp, Gossypium hirsutum
gcggtggcgcttgagataggcgtcggcaattttgagtgctaggaatatcagattccggcggtgttttaacttttaattttgactcttatttatactttgaagatttttttcaaccggaaaaggaagcaatcggtcgtcgccgtttccttattttatttttgctgttaaacaaattacgttaagaagagaagcaaaaaaaggaaaaagaaaatgtatgttattcatttacctcaattaatttcagtttttctgtgagattttgatatttttgagatttttttttggagtaaatcatgttaatttagtcattattgaattttgcgtttccgtatttcgtttagttttgatttgatttgattagaaaatgtgaagatttgttttaattttaattttttttaatgtttcaatttcgtgaatttttagatagtttttggatccgtatgtggatattcaagggaatattagtagtttatacgtttttgataatcatgctcattgcttttgctcctgttttttaacttaatcttctgtttgattttgcattgcaatttgtgaaatcgctgatcaaatctatgcttttttcaatcattttcagatccaaggagaaaaaaattattaaatccttccaaaagggaagtaaattgaacggatggaaactattacaaagcaatcacctcaaggttgcaataatatttgtccaacgccacctccattaccaggcccagctatgaactgtcggcggaagggatcggcaacaaaaggaaacagctgtgcgtc

SEQ ID NO: 14813 - DNA, 571 bp, Gossypium hirsutum
cagactaggtttggtttcttatcaaaaacccttttcctttcttagcttcatgttcttgtttggtgctttcatgggatgatcttctaacagttaaaggtttgtttgttctgttgcagtgattcgtgttcaaagaaccaaacaagccaagtacatggttgatttggacgttcagatccctacaactttcgatccattcgccgaggctggggaatttggtggcactggaaccaaggagtatgttcatatacggattcaacaaaggaacgggaagaaaagcttgacgacggttcaaggcctgaggcatgacctgagctacgagaaaatcctcaagagtctcaagaaggacttttgttgcaacggcaacgttgttaaagacaaagagctcggcaagatcattcaactccaaggcgatcaacgcaagaacgtgtcgcagttcctcgttaatgccgggatcgtcaagaaagaccaaatcaaaattcatggtttttaaggataacccaagttgctatttatgaaaaaaaaaatcagcactgtccctttattagcttaaataaaactctagtgctgctgt

SEQ ID NO: 14814 - DNA, 580 bp, Gossypium hirsutum
ctcttcttctgatgatcgggttctctcgctgcccgccgcaccaccactgcattcggtggccggctacgcgcaaaaatgggcattccaaccccatttcaaagcccctttgaaggccaaaccttcagcgtcctataagaaacaaaagaagagaaccctcacccccctttcgaacccgattgcaacgacggagaaagctttccgacgacacgtccgtggagattcaggtgaggtttctttacttattttcgaatgcaaaacaaaaaacaaaaaataaaaataaccaatgaaataaaaataaaacggaaacttaagcgaaaaatcacctaaaaattgttctgcttttttatatattctcgtaaaatgttcgtaagtgtttgtaaaaaatttacaaaggtgagattgtggcttttaaagccgtttacaagacgattcaatccttttttttgtcgttttcttccttgtctttgttgcatttacttcttctgcaggtgtcagaggcgtgggtgaacagtggttggcgcgtgaggtggctgagcatgcgtggggaggccaatggtgggagcggcggccgcaataggga

SEQ ID NO: 14815 - DNA, 580 bp, Gossypium hirsutum
ggatttggttgtaggcgcaatcgagacaactacaagtactttggaatgggcaatggcggaattactccaaaacccaaaagttttgcaggaagcccgaggagaactgaagcaaataattggcgaggggaacttggtggaggaatctaacattacttgtttaccttatttgcaagcaattgtcaaggaaacgatgaggttgcatccatcgtttcctttgttactccccagaaaagctgaagcagatatcgagattcacagcttcgtcattccaaaaggtacacaactgttgatcaacgcatgggctataggcagagatcctaagttctgggacgagcctgacttgtttcgtccagagaggttcataagatcagaaatggatgttaaaggaagggattttggactgattccgtttggaggtgggcgacgaatttgccctggattaccattggccatgagaatgttgcacttaatgttgggtggactcattcattcatttgattggaaacttgaaaataacatcacaccagggagtttagatatgaaggataagtatggtctttttctgcataaagctcaacca

SEQ ID NO: 14816 - DNA, 572 bp, Gossypium hirsutum
tatcttaaatcccaatccagcggtccaaaattcactactaacactatccccataaaagtatatttcagcaataacattattgttcatcatcatcatttcagtggaaggaagagaaaagcaaaacaccagttcaatttctaagctaagtaacaatggcttctctccctatattttcctttgttccttcaaaaacaaggatttacgcaacagcagctgcaaaaggtgcaggtggaggcaaagaagagaaagggcttttcgattggattcttgggaacttgcagaaggaagagcagttttatgaaactgaccctatcctcaagaaagttgaagaaaagaatggcggtggcagtggcagtggcactaccagtggtcgcaagaactctgtttcaatccctcagaagaagaaggacaatgctggctttgggcttggagggcttttcaagaaatgaaagatactataatcatcctttggggaagtttcattggtttggaattaattcatgttttctatcttcaatattatgaacctttcttcattcttgaacactaagctgttatcgatttcctttaat

SEQ ID NO: 14817 - DNA, 505 bp, Gossypium hirsutum
taggacatcatatctaccaataccgtcgtcgttttcaggtatccgtagtttttatacgtattcgtatacaatttttgctcattttttgcggtattttatacgtattcgttgatgcagcaagtcctactgtccgttctgtgtggatgtaaagcaattgcttcaaaaacttggagcttctttcaaggccattgagctcgacaaagaaagttagttttctttctttttcttttttattctagttttccctttttgaggtacgatgccgtttcgtaacaattttgtgattttaaggttttgaaatgaaaatacttttaattgcttgaattttgtgactattaatttgattcgattctgtttagtgtcttgatattgtgatatctttcagtaaaatcaaacgaaacttttgttcgtgatgggttatatcaagtgtgaaagtattttccccactttttaggaaacggttcttttataatctaatgaattatagctaaattagcaaaaaaaa

SEQ ID NO: 14818 - DNA, 565 bp, Gossypium hirsutum
catcgacggttcttctccatctgccatttcgcctccatgtttctgtggatcgcaccatatgaaagcatgattttccttattcgaagacgaacccaaaggttttgatgctcttaagccacagaattctcacttaaacttcgattactacgaagcaagcaaagatttgaaagtgccaataccaagataagtcactttctttttattttttttataccgtaaacaaaaatcgagaagaacaaagaaataaagcgaaagaaatgccagatctaagaatcacctttccaaaattgatttctaaatgccttttctttgtattcagtatccgtccattttacagtacaatcgacttctttttatagctgaatttctaaaataataaaataaaatacaaaaaaaaactgattttgttattcgtttgctggctattctggtactgcttagctgttattcgatttttctcgcaggttcgatagccgtacggaggagaagactgtggtgacgtggaggaggcagttggaggttgcggtggctgaagctcttagggtttgctgagtggttttttttg

SEQ ID NO: 14819 - DNA, 583 bp, Gossypium hirsutum
actagcctttaccgtcactcgactctgctaatctccattaaagaacaatgtccatgcctcatacagtcgtcgaccctcctcccctacactactccaccacccttcctccgccaccggtttccaaaaagcagccttccaaattctctcgctccatcctcaaactcttcaaattcgtattcaagttcagacaaagttcgagtcattcggttttgtggttgaaacaaagatcgctcggggactacttcgtagtttacgacaagacgggtgcactcacgaccatccccgaggtcccggagatcgattttggaggactttcgccggagattaactcgatggtagtcgagagaagtgaatcggaaagattcactgcagcgtccactgtcggtatttcatgtgcttaaaagaagctaaattatacagaaatattatcatatatatatatatatgaataacgaggatgtgatcaaatagttcgtttatattttgatcatattttttaggtttattttttcctctttaatgttaccgtaattagttgaagttttgtactttgatcctttcatgtctcagactctcagttcta

SEQ ID NO: 14820 - DNA, 784 bp, Gossypium hirsutum
atgtcctcttatcttctgccctcagtttgacgatttcactctttcagggaagctgattcattcaaaaacttgtcatttctttaagcttcccttgtcaaaactatcctccaaaaaactcttcaatctggttcacgcacccactcaacctgtatttgattctcagcatactccggaactcccccttccaggtacatctcttctctccgtcttaaagtttctgttgcgattttatgagcaagggcgttggcatttctcagaatatggttaaacaaaaaattcttagatcgactcatcatatgttgaatatctgatatatatgctcctatcatggatctgtcttgacacttgctattgcattttttaattattgagagagagtcaccttcgattataactgccggccagttattttcaactcctattcggactgctttgcggcaagcaactgcttcagcggcgaaggcggagacgaccctttggtgggtttctgaacaggatatgataactagcccttcttcattcatgactactactcctgatgcagaaagattattcggtccatcaaacacgccgtcgaagttgatcttgacaaactcccgaggtgggtacctccaactcctggcatcctttgtatttactagtttcctgttttcaagaccatcaagttcagcaatataattatgaatgaagtgtcctatttctttacccgtactgatctttttcttgtgtatccttgagttcagtctccccatatggcccagagtgcgcaacagaaaatccgaca

SEQ ID NO: 14821 - DNA, 569 bp, Gossypium hirsutum
catttcgttggtccattccaactgttcagtttcacttgaatcattggatctttcaaacaatatgatttcgggggaaatttcagcggaaattggactctgttggagtctgaaaacactgaaaatcccaacctctaaatcaaatatcagcagtttgcagttcttgactctggcttcaaacgacttaagtggtcaaattccaagtgaaataggccgattgaagagcttgaattggatttacattgaccgtaatcatttttctggaaaaatcccagaagaaataggcaacttagtttctcttaatcaccttgatcttgcgtggaacaatctcagtggtcaaatcccatcctcacttgggaacctcagcgaccttcattacctctacctgtggggaaacaagcttacaggttggcttcctacacccctttttcgcctcaaaatgctgactgaaattgatcttagctgaaatcatctatctggggaaatcccacaactcataattgttgagagctggactgcaatgcaacatgaagccagcagcaagctattgtcgagaccagcagcagctatcg

SEQ ID NO: 14822 - DNA, 592 bp, Gossypium hirsutum
ctctgtttcgtatttctcttaaactctacaatggctaaaacctttgcttgctttgtcctattagctttcatagttagttgcgcacttggtcaggctcctagctcggccccaaccaattcaccgccgtcttctaaccctactccggctcccaaggtttctccaaccatgtctccaaccgctacaccaaccgcatctccgccgtcaacatccactcccccgtcttcagcccctgaatcttcaccaacttcctctcccactacttctcccccagctcctctcgctggttctcccgctggctctccccctaccgctgattctcccacgaactccatcagcgagacaccaggcagctctcccacttctcctacgagtgcagccgcttggaacagagtcaccgtcgctggatctgccgttgcagtcgtttttgctgctttgttgatttagatctgactttcgggggaggacaggatttggatttgatgatttttattttaggctcattgttaatttctcatttttagtagtgtatttcttttgtttttatttatttttatttatattttgacggtgatgatgattttatatcactata

SEQ ID NO: 14823 - DNA, 755 bp, Gossypium hirsutum
  misc_feature (747)..(749): n is a, c, g, or t
ctgcatctcggtttcgaaatccctcgatcgccgtctaagctttcgaggtacctctaaatctactcttttttttctttttcttttcgttctttgttttttcaatggctgaatcgtgattaattttaacaggtcttcaaggcgccctttcgaaggtgaatcctgagcttatcaaatccgtgattgcctctggtttgaagaacccgcagggtcaggataatgtgtatcagatggactccaacaagtctttttcggtcccttccagtcctaaagaaactcagagtctgtttccagctttacctcttcttacccctgctgccaggtactcaattagttccttaatttccatataattatctttttgttcttcacaaaccggatttaaattttaaatcactgacttgaaaattgtgaatcttcttttatttagggctacatccgagaatggtcctgaaacagctcccttaaccattttctacaacggaacggtttccgtttttaatgtacctcgagataaggtttgtttaacaataagttaattatccaatttttttttttaaaaaaacttgttttattgttaaaatattcaatggtattaacctgtctataaaattttgactaggcggagagcatcttaaaactcgcggttgaagttgaaggaaactcaaaaaatgttgaaccaatagactcaaaagtggcaagtcctcctagcgatcgacaacagcttcttgaaactctcaatggaggtcnnngtctgc

SEQ ID NO: 14824 - DNA, 762 bp, Gossypium hirsutum
ctactccctagaacaactttccctcttgaaattccaaacgttactcttcactaaaaactcctcccatttctccctcagtaatccgactccttctctccctcagatgttccgtccactgtcgctcttcatccaccatagtcctaatcccaggaggaaccccatacatcagataagtagagactccctttttaattccttcggtagctatggtgtgagccactttgttggattatttgttgataaaatgaaaagcacaatagttgaagcttaaactcctgtgcttagagtctttgataaatgctgcgatttcagatctgtcctctttttcctcatgcagtttacgaatcaccgtcctagagtctccctcaacttccacttcactcagccttagatgaatgcccagttcaagagcctggaggcacgccatcgcttcagccgacggtatgtccgcatttaaaattgtacctgagcacttccgccttttcatttctgactactaatcttgagcatgattcttttcagtttctgttgaaagcagcatcaaagtttattttgactcgtgatccaaccggagcttcccatctgaccaagtggagccttcttttaggtacgaaatgattcaaatcatctaactcctttagatagtttaaaacaaaatctgctacctgagaccccgatctagattccccttcatgtagaaacctatttctgttggcccaaatcgcccataatgcgcaagtaatcatcctacacttggaaata

SEQ ID NO: 14825 - DNA, 602 bp, Gossypium hirsutum
tggcttcaccgccgtcctctccacttccacggtcagcagcacctcattcgtccgccgccagccagtgaggagcctatcctccctcccaaactttaagcaggctcttttcgggctaaaaccccaaagaggtgggcgtcttacaatggcagtatacaaagtaacgctgctcactccggaaggacctcaagagtttgagtgcccagatgacttgaagatcctggacgcggcggaggagaacgggattgatcttccgtactcgtgcagggctggtgcttgctcttcatgtgctgggagagtcaaagaaggcagtgtggaccagtctgaaaatagcttccttagtgatgaacaaatgggtgaaggctttgttctcacttgcgttgctctcccaacaagtgatgtcgtcattgaaacacaccgggaggaagatgtcgtttaaagcaactgggttttcagggttttttttcttgggggggggacttttagtgttgtttaagggatgtgtttattttttaatgttcttgaatgaattccatgttcttttaaggttttttgttgttgttcatttttgtagtcacaaaaatggaatcattgtagccctaaaa

SEQ ID NO: 14826 - DNA, 764 bp, Gossypium hirsutum
gactcttgagagaggacagcgattagaccgagttgactcacaccacgagccggacctgacttcaatcagctcaagcctgtcctctgtattcagtgcggttgattctaggagcgcgacaagttccggcgatatatccggaacgagcgggagttccggcgagatattaacggcggatgctgtggttccgaggctgctcgagcctgcgcctgcatgcgaggagttgaaggcgacggtaacggcgaggcagaaatgtgttgggaggaataacaagggagtgacgtgggggttcacttcggtgatcgggagacagcgagagatggaagatgccgtcgccgttgtaccggcgttcatgtctcttacatgtgatcacgtgggaggttgtacggctcctggttctagaacctcccctgaaatctcacctatccatttcttcggcgtttatgatggccatggtggttctcaggtaacaaaatctcccctattcaaattgcttaccgaaatttatttacttccttattaaaaaaacccgtttggctctctagaaaatttactgctctaatttaagtcttggagaaatcaaagtaaggtagatcagtaatcacttggctcaataaaaaagaaaaaaaaatctcttttcccgttttcatggaaaataattattttgagattcttcttccttttctaatttaatatagaaattctaatttttaaaataaacaaaaatatattttaggtcaatgattggacataaataattgtttatg

SEQ ID NO: 14827 - DNA, 475 bp, Gossypium hirsutum
tctctgtttctagctcactgaatctaatggctttcactcattatttgtttgcagttccaatggacacttcaattcaccccaaaatttcaattcccccttcgttttgttccactgaatccccatcttccttacctttcccttctttttcttccccttttcctccattgtctaaagctcgaaatctctctattttccccagaatcaacagagtgggacacaaaggtatcttcttttatcatcattgtttttgattaattttaatgggaatcattttttattactttttttaagctgacaatcgttgattcgtttaattttttttgagtgaacagcaaaagctgagcctcgagaatctgaagtgaatatagaagctgatgcgttttctcatttcaagcatttgcttcttccaataactgatagaaatccttatctttctgaaggaactagacaggttaatttcttaaagacatttttt

SEQ ID NO: 14828 - DNA, 783 bp, Gossypium hirsutum
tatcaaatcgaacaggcaattttaagtcttgccaggtatgtatgttgcatctcttcttgtaattcatatgttagaagcaaaacacatccatgtctaaaatttcacaacaaacatttatcccagacattaatattaccatgatacacaaaatcatccacgttaacattccataaaatttaagaaacttcaactcttcttttttgttctttttggttcttttgggttttgcttttacatgttgtatggtaccaaaacagactgatatgttccacaatctctttccctcagaatttacaaactttctaacttcgaccacacccgaaggtttagaatccagggcctaagagcagctcgttgagtacaaacacaacaaagaccatcaggttttgccactccccctattgctgttttctgctctctttttttgcagggtgcacgatgacccgtttttgaaatcgttaattccttcataatttgtcaatcattcagcgtataggatgatactgggtaatacctcgttttggtggcaacttcctcaaaatgaaaaggactaaggatgaaggtaatatctccaccaactgcccatcaaaagaaaacaaaccaaccaacaaaattcatttaaaatttcactttccatatctataagcaaggcatgaagttcatgtcccacgcttaggaattataataatagatatattcagtcttagattgttgagagaaatccaagtttaacatcctacttagactgttttatttggttattttgtgaagtcgaaactactc

SEQ ID NO: 14829 - DNA, 785 bp, Gossypium hirsutum
  misc_feature (698)..(701): n is a, c, g, or t
  misc_feature (734)..(734): n is a, c, g, or t
  misc_feature (736)..(742): n is a, c, g, or t
  misc_feature (748)..(752): n is a, c, g, or t
  misc_feature (759)..(759): n is a, c, g, or t
  misc_feature (763)..(763): n is a, c, g, or t
  misc_feature (765)..(768): n is a, c, g, or t
  misc_feature (770)..(770): n is a, c, g, or t
gtagaaaagcccaatttcatttttgaaagcaccctcttctcttcccttttcttcaagatcctcttcttcttgtttcgtcccactttgttcttccactccttatactagttcaactacaaaggagttcaatttggagtccaatggattgccccaaacctcaaaatctaatcttgatggagaatccaatgagaattacaatgtggggattggtcatccagtcgtcccaaattttattccaactcaaaagatgagtttgagtgatcaagccttctatctgttcacttttattgcttgtacggtatggttttaaggcttttcaggttattgtgtgctatatatgtgtgtatgtggaattttcatgctatatatgtgcgtatgtgtgagagagaatatttgattgatagtctcattacttggaaggtgtgctaaatatgttctgtaaagtgtaaacggattgttcttttatgttttgagattatttagtgcttattttgaggttgtttaagggcagttcttggttttgggcatgttttatgtgagtgcttcttattgcttaatggatattttcaaaatttgataagcatctcttgtttgcatgtagcttatatatatatatgtatatgaaattgatgtttgataatgttggaatagtaacttggttatagtatgccgttcccactattcaattttttctttannnncctccaagtacacataaaaacttggaaaaaatngnnnnnnntcgtgnnnnnaacatantcgnannnnanactcatgttcgagtc

SEQ ID NO: 14830 - DNA, 595 bp, Gossypium hirsutum
ttctcccctcttcgactcgcctcttttccgctcccatattcttctcacctgaattttccctgaaagttggccaagaagataaaaagtttcgtttcccttctgaattgatatttttggaaaccctagcttacctcgattgtagaccttttttttagatggatttggctgcatatgcattacctacctcgattctttagtcgtagaagcgcgatgtattcgaagaggagccggagtaagccgagactcgagcgccgcaatgcagcgaagcacatcgactacgatgcagcgtcgttttcttcgtctctcgatgatacctcttcatcttcttctctaatcacgcgatcgctcgatttgtccgataaaaccagcttccgtatccaaggaacagaaggagagttcgaccttatttgtcggaccttgggcctttctggtcctgaagatttttccattccagccgccgcttgggagtcccgtaaaattcgatcctcgtcggatcttctgcctcggtccagattgaaccggctggatagtcctgaggaagagacaggcaagataattttagaagacggcactgaagtaacagtctctgaattaa

SEQ ID NO: 14831 - DNA, 748 bp, Gossypium hirsutum
gagagcaacgagtttacttggcaaggctcgctgagcaagctgaaagatacgatggtaactacctttttgtggatctttcaattgattcgtgagattttgtttgcttactttttttaatcctttattttctctgatttgatcggtagtcttattctgtttcgtttttgtcgttttaacttgatctctagcttgatctgtagtttagagaatagtagaggctttggttctgatttgatgataatatactgaaaagaggtgatgaagttgagacttgagttacaacctttttttaaaaacaaaatttgtagcagtagataaatattagcttatctaggcataaagaagtccgatttgataaagcaattgctagtactttttattaattaaggttaaaaacttgtggagaaataaaatgcttgttttttactatcatttgagatgtttatgtttaagtttttacattttgaggtgttgctcattttcttaaaaaaaaacggtgtttttttttcttttgaatttgctattaagtttcccattttaacaaatttgaagaagcaaaagacaaattagcaaatatatgtatgtttggggctcattttttggtttgttggaacctcagctcatttggaatctgttttaaaattgtaaaaaaactttactatttcagagatggttgaggccatgaagagtgttgctaagttggatgttgagctgactgtggaggagaggaatctgttatctgtgggat

SEQ ID NO: 14832 - DNA, 580 bp, Gossypium hirsutum
  misc_feature (570)..(571): n is a, c, g, or t
tggagtatttggagattgattcttcttcatgcaagccatgcagccctgactcagagttatcctcctcctcatctacctcatcagcttatgatctgccattaatggttgtttcgagttcccataagcgaaaagctggtcgaaagaagtttaaagagactcgtcatccggtatttagaggtgtacggcaaaggagagggagtaaatgggtgtctgaaattcgtgaaccttacaagaaatcaaggatttggttgggcactttccttagccctgaaatggcagctagggcttatgacgttgccgtcttagcgcttaggggcaaatccgccgctcttaattttccagactcggcttctgttctccctagggctaagtcttcttcgccaaaagacatacaaatcgctgcgtttgccgctgccgaggcttttaaaccaataacttcaacggatattgatcctcaaccagtgggatgctcatcatcaacctcagtttccactgagaacgacgaagaaaagagccttttagatgatggctcgatgtgggatcgtagttggagcttggaggccaccaacnntaatgataa

SEQ ID NO: 14833 - DNA, 25 bp, Gossypium hirsutum
cacctcctatcgatcacaacttgag

SEQ ID NO: 14834 - DNA, 17 bp, Gossypium hirsutum
ccaattagtcgaagaac

SEQ ID NO: 14835 - DNA, 15 bp, Gossypium hirsutum
aattcgtcgaagaac

SEQ ID NO: 14836 - DNA, 25 bp, Gossypium hirsutum
gtttaggtgaggattgtgtgatggt

SEQ ID NO: 14837 - DNA, 23 bp, Gossypium hirsutum
cttgagagggagttgttgcatct

SEQ ID NO: 14838 - DNA, 15 bp, Gossypium hirsutum
cagcttccgacaacc

SEQ ID NO: 14839 - DNA, 16 bp, Gossypium hirsutum
tcagcttctgacaacc

SEQ ID NO: 14840 - DNA, 25 bp, Gossypium hirsutum
acagacccagaagctttagattgac

SEQ ID NO: 14841 - DNA, 25 bp, Gossypium hirsutum
ccaacaggctcagtctgatatgaat

SEQ ID NO: 14842 - DNA, 16 bp, Gossypium hirsutum
ttgagtgggcttttat

SEQ ID NO: 14843 - DNA, 16 bp, Gossypium hirsutum
ttgagtgggattttat

SEQ ID NO: 14844 - DNA, 22 bp, Gossypium hirsutum
gtgtgtgaggtcttgggttcaa

SEQ ID NO: 14845 - DNA, 30 bp, Gossypium hirsutum
gttcattcattaaattggacattggttggt

SEQ ID NO: 14846 - DNA, 14 bp, Gossypium hirsutum
caacgcagagaaat

SEQ ID NO: 14847 - DNA, 16 bp, Gossypium hirsutum
aacaacgaagagaaat

SEQ ID NO: 14848 - DNA, 29 bp, Gossypium hirsutum
gttttgggttttcattacacaccttatgt

SEQ ID NO: 14849 - DNA, 30 bp, Gossypium hirsutum
cccataccacggttcacttaaaatttattt

SEQ ID NO: 14850 - DNA, 22 bp, Gossypium hirsutum
cttatatattaggaaaaacttt

SEQ ID NO: 14851 - DNA, 22 bp, Gossypium hirsutum
cttatatattaggaagaacttt

SEQ ID NO: 14852 - DNA, 25 bp, Gossypium hirsutum
aaatcggatgtctcacagtttctca

SEQ ID NO: 14853 - DNA, 36 bp, Gossypium hirsutum
cgatctcgattcaatctcatttagaaaactttattt

SEQ ID NO: 14854 - DNA, 22 bp, Gossypium hirsutum
aaatggattacaaatacacttt

SEQ ID NO: 14855 - DNA, 21 bp, Gossypium hirsutum
aatggattacaaatacgcttt

SEQ ID NO: 14856 - DNA, 29 bp, Gossypium hirsutum
gatagagttaaaactttgggcattaaggc

SEQ ID NO: 14857 - DNA, 30 bp, Gossypium hirsutum
tcaatggtgggtttcacactaacaatatta

SEQ ID NO: 14858 - DNA, 21 bp, Gossypium hirsutum
agcattaccattcctttagat

SEQ ID NO: 14859 - DNA, 19 bp, Gossypium hirsutum
cattaccattccattagat

SEQ ID NO: 14860 - DNA, 41 bp, Gossypium hirsutum
ttttcttcttttctctttctctcttcctatctattattttt

SEQ ID NO: 14861 - DNA, 25 bp, Gossypium hirsutum
tcaaccaggatgtagacgtgaattt

SEQ ID NO: 14862 - DNA, 17 bp, Gossypium hirsutum
caacaacaaaaaatcat

SEQ ID NO: 14863 - DNA, 18 bp, Gossypium hirsutum
acaacaacaaaatatcat

SEQ ID NO: 14864 - DNA, 33 bp, Gossypium hirsutum
aacaatactcatgtcaaacaaactaaaactcaa

SEQ ID NO: 14865 - DNA, 34 bp, Gossypium hirsutum
caacaatttaccttttttgatcaattgaaatcgt

SEQ ID NO: 14866 - DNA, 21 bp, Gossypium hirsutum
cttcattacttcctagccaaa

SEQ ID NO: 14867 - DNA, 18 bp, Gossypium hirsutum
cattacttcccagccaaa

SEQ ID NO: 14868 - DNA, 29 bp, Gossypium hirsutum
cttgtgactgttcttcattttaggtctct

SEQ ID NO: 14869 - DNA, 25 bp, Gossypium hirsutum
caaaattcttcgagcccacactttc

SEQ ID NO: 14870 - DNA, 21 bp, Gossypium hirsutum
aaactttatcaataaaatgtc

SEQ ID NO: 14871 - DNA, 21 bp, Gossypium hirsutum
aaactttatcaatagaatgtc

SEQ ID NO: 14872 - DNA, 22 bp, Gossypium hirsutum
tcgtcctcaaagcccaaatctg

SEQ ID NO: 14873 - DNA, 25 bp, Gossypium hirsutum
agccacttacttgtagcactttctt

SEQ ID NO: 14874 - DNA, 17 bp, Gossypium hirsutum
acctcttcatcatcatc

SEQ ID NO: 14875 - DNA, 17 bp, Gossypium hirsutum
acctcttcttcatcatc

SEQ ID NO: 14876 - DNA, 23 bp, Gossypium hirsutum
gcgtgcgattcatcaactgattg

SEQ ID NO: 14877 - DNA, 28 bp, Gossypium hirsutum
tgcccaagttattgtttaggtagatgtt

SEQ ID NO: 14878 - DNA, 16 bp, Gossypium hirsutum
cgaactcgtgttcaaa

SEQ ID NO: 14879 - DNA, 18 bp, Gossypium hirsutum
ttcgaactcatgttcaaa

SEQ ID NO: 14880 - DNA, 32 bp, Gossypium hirsutum
tcttcacaagagataacttaatctctctcctt

SEQ ID NO: 14881 - DNA, 37 bp, Gossypium hirsutum
cggaagaagaaaagaaccaaaagaaactaaatatttt

SEQ ID NO: 14882 - DNA, 18 bp, Gossypium hirsutum
cactttcttcctttcttc

SEQ ID NO: 14883 - DNA, 17 bp, Gossypium hirsutum
actttcttcccttcttc

SEQ ID NO: 14884 - DNA, 39 bp, Gossypium hirsutum
ggagtaattttgtttaagatttgttttttttagttgcta

SEQ ID NO: 14885 - DNA, 25 bp, Gossypium hirsutum
gcaagcaagtcaaaaggtaaggaaa

SEQ ID NO: 14886 - DNA, 18 bp, Gossypium hirsutum
ccaatcatgctttcgctt

SEQ ID NO: 14887 - DNA, 18 bp, Gossypium hirsutum
ccaatcatgctttcactt

SEQ ID NO: 14888 - DNA, 24 bp, Gossypium hirsutum
gcataccactagtgacttcagaca

SEQ ID NO: 14889 - DNA, 31 bp, Gossypium hirsutum
cagaaggaaccccaacaaaattctaaaaatt

SEQ ID NO: 14890 - DNA, 19 bp, Gossypium hirsutum
aagagaagaacgtaaagag

SEQ ID NO: 14891 - DNA, 19 bp, Gossypium hirsutum
aagagaagaacgtgaagag

SEQ ID NO: 14892 - DNA, 35 bp, Gossypium hirsutum
aaagaagttgttctcataaaacaaatatcacgttt

SEQ ID NO: 14893 - DNA, 28 bp, Gossypium hirsutum
agacctcagatgtaattcccaatactga

SEQ ID NO: 14894 - DNA, 21 bp, Gossypium hirsutum
catagcaatctctagacataa

SEQ ID NO: 14895 - DNA, 20 bp, Gossypium hirsutum
atagcaatctctaaacataa

SEQ ID NO: 14896 - DNA, 23 bp, Gossypium hirsutum
gagtgggtgtttgacagaattcc

SEQ ID NO: 14897 - DNA, 26 bp, Gossypium hirsutum
gctgggtattgtgttaaaggcataga

SEQ ID NO: 14898 - DNA, 17 bp, Gossypium hirsutum
cttgcctaaagaaatat

SEQ ID NO: 14899 - DNA, 17 bp, Gossypium hirsutum
cttgcctaaaaaaatat

SEQ ID NO: 14900 - DNA, 25 bp, Gossypium hirsutum
ctttcgagagcaagaccacaatttg

SEQ ID NO: 14901 - DNA, 25 bp, Gossypium hirsutum
gggagatgatgaatcagtgagttca

SEQ ID NO: 14902 - DNA, 17 bp, Gossypium hirsutum
actcgtttcctgctcac

SEQ ID NO: 14903 - DNA, 15 bp, Gossypium hirsutum
tcgtttccagctcac

SEQ ID NO: 14904 - DNA, 26 bp, Gossypium hirsutum
acccttcttctcttcttctaccttca

SEQ ID NO: 14905 - DNA, 25 bp, Gossypium hirsutum
aggtgagggagaatttgacattagc

SEQ ID NO: 14906 - DNA, 16 bp, Gossypium hirsutum
cacattcggcacctat

SEQ ID NO: 14907 - DNA, 17 bp, Gossypium hirsutum
tcacattcggtacctat

SEQ ID NO: 14908 - DNA, 26 bp, Gossypium hirsutum
tgagaagtgtaaagaggtggagatga

SEQ ID NO: 14909 - DNA, 34 bp, Gossypium hirsutum
cggacccttaacagactaaataaatcaacttaat

SEQ ID NO: 14910 - DNA, 22 bp, Gossypium hirsutum
caataatctcatcttaaacatt

SEQ ID NO: 14911 - DNA, 18 bp, Gossypium hirsutum
aatctcatctcaaacatt

SEQ ID NO: 14912 - DNA, 32 bp, Gossypium hirsutum
tgttttattatatcttgaaaggtgttggtcga

SEQ ID NO: 14913 - DNA, 27 bp, Gossypium hirsutum
tcctaggcttaaagcaataagtgtgtt

SEQ ID NO: 14914 - DNA, 20 bp, Gossypium hirsutum
ctctgtgctagttctaaaga

SEQ ID NO: 14915 - DNA, 18 bp, Gossypium hirsutum
ctgtgctagttgtaaaga

SEQ ID NO: 14916 - DNA, 25 bp, Gossypium hirsutum
tggactgctgaagagattcctgtaa

SEQ ID NO: 14917 - DNA, 25 bp, Gossypium hirsutum
ctcaaacgctgattagggattcctt

SEQ ID NO: 14918 - DNA, 21 bp, Gossypium hirsutum
tctattccattctctaccctc

SEQ ID NO: 14919 - DNA, 17 bp, Gossypium hirsutum
ttccattctctgccctc

SEQ ID NO: 14920 - DNA, 24 bp, Gossypium hirsutum
gcagaaatcaatggaagggaaagg

SEQ ID NO: 14921 - DNA, 25 bp, Gossypium hirsutum
cggaaagaattcaggttacgcctat

SEQ ID NO: 14922 - DNA, 19 bp, Gossypium hirsutum
caatgacatacaaagaatt

SEQ ID NO: 14923 - DNA, 18 bp, Gossypium hirsutum
aatgacatacaaggaatt

SEQ ID NO: 14924 - DNA, 25 bp, Gossypium hirsutum
gcatgggcatcgaataaactttgat

SEQ ID NO: 14925 - DNA, 24 bp, Gossypium hirsutum
gggaggaattgaggaatgaaaacg

SEQ ID NO: 14926 - DNA, 24 bp, Gossypium hirsutum
ttcctaaagatttcttttcccatc

SEQ ID NO: 14927 - DNA, 22 bp, Gossypium hirsutum
cctaaagatttctttccccatc

SEQ ID NO: 14928 - DNA, 30 bp, Gossypium hirsutum
tgaaaaaaagagagtcagttttctctccat

SEQ ID NO: 14929 - DNA, 33 bp, Gossypium hirsutum
aggaacaactagtaaacaaaaaaacgaagaaaa

SEQ ID NO: 14930 - DNA, 24 bp, Gossypium hirsutum
aaagaaataaaaaaaaagaagaag

SEQ ID NO: 14931 - DNA, 23 bp, Gossypium hirsutum
aaagaaataaaaaaaagaagaag

SEQ ID NO: 14932 - DNA, 26 bp, Gossypium hirsutum
tgaatttctgactggtggtttaagca

SEQ ID NO: 14933 - DNA, 31 bp, Gossypium hirsutum
gtgagcatttgattcaaatattgagaaggat

SEQ ID NO: 14934 - DNA, 15 bp, Gossypium hirsutum
ccgatagccaagact

SEQ ID NO: 14935 - DNA, 17 bp, Gossypium hirsutum
ctccgataaccaagact

SEQ ID NO: 14936 - DNA, 29 bp, Gossypium hirsutum
catttatgtctttacctatggagtcagct

SEQ ID NO: 14937 - DNA, 26 bp, Gossypium hirsutum
ccgcaatgagttaagaatttcttcgt

SEQ ID NO: 14938 - DNA, 19 bp, Gossypium hirsutum
acaagaagcattcaggaat

SEQ ID NO: 14939 - DNA, 17 bp, Gossypium hirsutum
aagaagcattcgggaat

SEQ ID NO: 14940 - DNA, 25 bp, Gossypium hirsutum
agctttggctctacatcattgttca

SEQ ID NO: 14941 - DNA, 22 bp, Gossypium hirsutum
tcaacaagtgtacgggcatcag

SEQ ID NO: 14942 - DNA, 18 bp, Gossypium hirsutum
caatcaagccactcatag

SEQ ID NO: 14943 - DNA, 16 bp, Gossypium hirsutum
atcaagccgctcatag

SEQ ID NO: 14944 - DNA, 28 bp, Gossypium hirsutum
cagcagtgttgagaagattatggaaatt

SEQ ID NO: 14945 - DNA, 32 bp, Gossypium hirsutum
tctaggtttagttgaatcttagcaaatggaaa

SEQ ID NO: 14946 - DNA, 16 bp, Gossypium hirsutum
aaatgcaacatttaac

SEQ ID NO: 14947 - DNA, 16 bp, Gossypium hirsutum
aaatgcaaaatttaac

SEQ ID NO: 14948 - DNA, 24 bp, Gossypium hirsutum
gagaagcaagtccaaagctttacc

SEQ ID NO: 14949 - DNA, 27 bp, Gossypium hirsutum
ttgtgctttcttttgggtattttcgtt

SEQ ID NO: 14950 - DNA, 17 bp, Gossypium hirsutum
tcggattgctttctttt

SEQ ID NO: 14951 - DNA, 17 bp, Gossypium hirsutum
tcggattgctttgtttt

SEQ ID NO: 14952 - DNA, 22 bp, Gossypium hirsutum
ccagaacaactcctgcaaacca

SEQ ID NO: 14953 - DNA, 22 bp, Gossypium hirsutum
gcggagagttccttactgcaaa

SEQ ID NO: 14954 - DNA, 16 bp, Gossypium hirsutum
catgtcaaaaaacttg

SEQ ID NO: 14955 - DNA, 15 bp, Gossypium hirsutum
atgtcaaagaacttg

SEQ ID NO: 14956 - DNA, 22 bp, Gossypium hirsutum
tcaaccgtcaccaactgttctt

SEQ ID NO: 14957 - DNA, 29 bp, Gossypium hirsutum
agttaaagaatggccatcttctaaaccaa

SEQ ID NO: 14958 - DNA, 19 bp, Gossypium hirsutum
ttgagcaacaaatgtctaa

SEQ ID NO: 14959 - DNA, 19 bp, Gossypium hirsutum
ttgagcaacatatgtctaa

SEQ ID NO: 14960 - DNA, 31 bp, Gossypium hirsutum
gctttgtttcaaaagaactagatttctcgtt

SEQ ID NO: 14961 - DNA, 19 bp, Gossypium hirsutum
gccttgccctcctcctatg

SEQ ID NO: 14962 - DNA, 16 bp, Gossypium hirsutum
aacgggaaaaataatt

SEQ ID NO: 14963 - DNA, 14 bp, Gossypium hirsutum
cgggaacaataatt

SEQ ID NO: 14964 - DNA, 24 bp, Gossypium hirsutum
acctctacgatatcaccagaagca

SEQ ID NO: 14965 - DNA, 25 bp, Gossypium hirsutum
aacaggaagggagttagcacaaaat

SEQ ID NO: 14966 - DNA, 17 bp, Gossypium hirsutum
ctgtcaaacgctgcatc

SEQ ID NO: 14967 - DNA, 17 bp, Gossypium hirsutum
ctgtcaaacactgcatc

SEQ ID NO: 14968 - DNA, 28 bp, Gossypium hirsutum
ctaaacttgtcgctgatatgaaggttct

SEQ ID NO: 14969 - DNA, 25 bp, Gossypium hirsutum
tgtccaattcgcttattctcaccat

SEQ ID NO: 14970 - DNA, 19 bp, Gossypium hirsutum
agtctcctttacagcccag

SEQ ID NO: 14971 - DNA, 17 bp, Gossypium hirsutum
tctcctttacggcccag

SEQ ID NO: 14972 - DNA, 25 bp, Gossypium hirsutum
gagatcatccaacagccaataccat

SEQ ID NO: 14973 - DNA, 15 bp, Gossypium hirsutum
cgacgcggcgtccat

SEQ ID NO: 14974 - DNA, 20 bp, Gossypium hirsutum
taattcatgaacgcctctat

SEQ ID NO: 14975 - DNA, 21 bp, Gossypium hirsutum
ctaattcatgaacacctctat

SEQ ID NO: 14976 - DNA, 40 bp, Gossypium hirsutum
gttgatacaaatatattagttcaattcaaatctgattcga

SEQ ID NO: 14977 - DNA, 24 bp, Gossypium hirsutum
tgtcttggtattctctcccatggt

SEQ ID NO: 14978 - DNA, 17 bp, Gossypium hirsutum
aaagcttaggaagtaac

SEQ ID NO: 14979 - DNA, 18 bp, Gossypium hirsutum
caaagcttagaaagtaac

SEQ ID NO: 14980 - DNA, 27 bp, Gossypium hirsutum
tctttccaagtttatagcttcagccat

SEQ ID NO: 14981 - DNA, 27 bp, Gossypium hirsutum
acccttttgttgctttttggtgataat

SEQ ID NO: 14982 - DNA, 22 bp, Gossypium hirsutum
ttagtatctttatagcaaacct

SEQ ID NO: 14983 - DNA, 16 bp, Gossypium hirsutum
tctttatggcaaacct

SEQ ID NO: 14984 - DNA, 27 bp, Gossypium hirsutum
gaaagattgcattccagtaaccagaat

SEQ ID NO: 14985 - DNA, 45 bp, Gossypium hirsutum
cctctattttatatcatgtaatttatattcagattcatttttcgt

SEQ ID NO: 14986 - DNA, 16 bp, Gossypium hirsutum
cttccggagcgttacg

SEQ ID NO: 14987 - DNA, 15 bp, Gossypium hirsutum
ttccggagcattacg

SEQ ID NO: 14988 - DNA, 24 bp, Gossypium hirsutum
gcttgtgagcttcagtctttttgg

SEQ ID NO: 14989 - DNA, 25 bp, Gossypium hirsutum
caagcacaagaagaagaaggtcaag

SEQ ID NO: 14990 - DNA, 16 bp, Gossypium hirsutum
actggaggacggcgag

SEQ ID NO: 14991 - DNA, 15 bp, Gossypium hirsutum
ctggaggacagcgag

SEQ ID NO: 14992 - DNA, 22 bp, Gossypium hirsutum
ccggactcatccaccttgtaaa

SEQ ID NO: 14993 - DNA, 22 bp, Gossypium hirsutum
tccaccccattccatccttaga

SEQ ID NO: 14994 - DNA, 16 bp, Gossypium hirsutum
ttggatcaagaacctc

SEQ ID NO: 14995 - DNA, 15 bp, Gossypium hirsutum
tggatcaagagcctc

SEQ ID NO: 14996 - DNA, 28 bp, Gossypium hirsutum
ttccttcagtatgaaacgagaatttcga

SEQ ID NO: 14997 - DNA, 25 bp, Gossypium hirsutum
cagggacatcaaatcaagcaacatt

SEQ ID NO: 14998 - DNA, 15 bp, Gossypium hirsutum
ctttgcaacgaaatc

SEQ ID NO: 14999 - DNA, 13 bp, Gossypium hirsutum
ttgcaacaaaatc

SEQ ID NO: 15000 - DNA, 23 bp, Gossypium hirsutum
ggtgaattcaacggacccgatac

SEQ ID NO: 15001 - DNA, 41 bp, Gossypium hirsutum
caggtatctctttttattttgattcagatctatattattcg

SEQ ID NO: 15002 - DNA, 19 bp, Gossypium hirsutum
ctatgtcaatggatgtaac

SEQ ID NO: 15003 - DNA, 20 bp, Gossypium hirsutum
tctatgtcaatgtatgtaac

SEQ ID NO: 15004 - DNA, 25 bp, Gossypium hirsutum
caacggatctaagcagatctaaacg

SEQ ID NO: 15005 - DNA, 22 bp, Gossypium hirsutum
gcgtaagcagctagccactaaa

SEQ ID NO: 15006 - DNA, 15 bp, Gossypium hirsutum
aagtcagcaccggcg

SEQ ID NO: 15007 - DNA, 15 bp, Gossypium hirsutum
aagtcagctccggcg

SEQ ID NO: 15008 - DNA, 21 bp, Gossypium hirsutum
cctgaaacggtgaggcttctt

SEQ ID NO: 15009 - DNA, 26 bp, Gossypium hirsutum
gtgattgttgattattgtgggttgca

SEQ ID NO: 15010 - DNA, 19 bp, Gossypium hirsutum
aagctaattgagtaaacac

SEQ ID NO: 15011 - DNA, 19 bp, Gossypium hirsutum
aagctaattgaataaacac

SEQ ID NO: 15012 - DNA, 27 bp, Gossypium hirsutum
ctcaaatttttgacctgcttgacaaac

SEQ ID NO: 15013 - DNA, 33 bp, Gossypium hirsutum
gtttcggtctgtaataaatagtttctaggatct

SEQ ID NO: 15014 - DNA, 17 bp, Gossypium hirsutum
tctgcagtgcttataaa

SEQ ID NO: 15015 - DNA, 17 bp, Gossypium hirsutum
tctgcagagcttataaa

SEQ ID NO: 15016 - DNA, 28 bp, Gossypium hirsutum
tttggaaaggagaattatctggtgagtt

SEQ ID NO: 15017 - DNA, 23 bp, Gossypium hirsutum
agacctcacaatggttggcaatt

SEQ ID NO: 15018 - DNA, 21 bp, Gossypium hirsutum
aagaaaatgaataagataaag

SEQ ID NO: 15019 - DNA, 21 bp, Gossypium hirsutum
aagaaaatgaataacataaag

SEQ ID NO: 15020 - DNA, 38 bp, Gossypium hirsutum
gagtagggaagacagtatatggatattagaatttagat

SEQ ID NO: 15021 - DNA, 17 bp, Gossypium hirsutum
gtaggccgcgtcgaagt

SEQ ID NO: 15022 - DNA, 16 bp, Gossypium hirsutum
ccaggagtcgcaatat

SEQ ID NO: 15023 - DNA, 15 bp, Gossypium hirsutum
caggagtcacaatat

SEQ ID NO: 15024 - DNA, 26 bp, Gossypium hirsutum
tggaaatgttgtacaggaaagaagga

SEQ ID NO: 15025 - DNA, 25 bp, Gossypium hirsutum
catgggaaacagttgctttctttct

SEQ ID NO: 15026 - DNA, 22 bp, Gossypium hirsutum
cccgatataattagcgtaccga

SEQ ID NO: 15027 - DNA, 21 bp, Gossypium hirsutum
ccgatataattagcataccga

SEQ ID NO: 15028 - DNA, 22 bp, Gossypium hirsutum
gcctgccaagtgagacatatca

SEQ ID NO: 15029 - DNA, 36 bp, Gossypium hirsutum
actggagtgaatatctaagagaattgataaatcgta

SEQ ID NO: 15030 - DNA, 19 bp, Gossypium hirsutum
aatcatccataagatgtgc

SEQ ID NO: 15031 - DNA, 17 bp, Gossypium hirsutum
tcatccataaaatgtgc

SEQ ID NO: 15032 - DNA, 29 bp, Gossypium hirsutum
acatgaaattaagacattaggagcatcga

SEQ ID NO: 15033 - DNA, 33 bp, Gossypium hirsutum
tcttcattttgtctttgtcagagtttttttctc

SEQ ID NO: 15034 - DNA, 23 bp, Gossypium hirsutum
ccaaaatttatgtgtattttaaa

SEQ ID NO: 15035 - DNA, 21 bp, Gossypium hirsutum
caaaatttatgtgtatttaaa

SEQ ID NO: 15036 - DNA, 25 bp, Gossypium hirsutum
gggacaacattctctggaactgaaa

SEQ ID NO: 15037 - DNA, 25 bp, Gossypium hirsutum
gcttcaagagaggatatcccagatt

SEQ ID NO: 15038 - DNA, 20 bp, Gossypium hirsutum
ctgaaaatctttcagctcac

SEQ ID NO: 15039 - DNA, 17 bp, Gossypium hirsutum
aaaatcttgcagctcac

SEQ ID NO: 15040 - DNA, 32 bp, Gossypium hirsutum
catcatcaagctgtggcaaaatagaataaatt

SEQ ID NO: 15041 - DNA, 24 bp, Gossypium hirsutum
cgccttctggtttattgtcatcac

SEQ ID NO: 15042 - DNA, 16 bp, Gossypium hirsutum
actttccccctcttgc

SEQ ID NO: 15043 - DNA, 17 bp, Gossypium hirsutum
cactttcctcctcttgc

SEQ ID NO: 15044 - DNA, 20 bp, Gossypium hirsutum
gctactgtggctgagcatga

SEQ ID NO: 15045 - DNA, 31 bp, Gossypium hirsutum
aggacttatctactgaactagttttgcaatt

SEQ ID NO: 15046 - DNA, 19 bp, Gossypium hirsutum
tggaatcctttgccactat

SEQ ID NO: 15047 - DNA, 22 bp, Gossypium hirsutum
atatggaatccttttccactat

SEQ ID NO: 15048 - DNA, 24 bp, Gossypium hirsutum
caaagctgtgctcatagggattga

SEQ ID NO: 15049 - DNA, 20 bp, Gossypium hirsutum
acgagtcgggtcgggtatag

SEQ ID NO: 15050 - DNA, 15 bp, Gossypium hirsutum
ccttagcccattgtc

SEQ ID NO: 15051 - DNA, 16 bp, Gossypium hirsutum
cccttaacccattgtc

SEQ ID NO: 15052 - DNA, 22 bp, Gossypium hirsutum
cggaagggttcctcgataactg

SEQ ID NO: 15053 - DNA, 25 bp, Gossypium hirsutum
ccgcacaaccttttcaattacaact

SEQ ID NO: 15054 - DNA, 15 bp, Gossypium hirsutum
cctacaccagaaaat

SEQ ID NO: 15055 - DNA, 14 bp, Gossypium hirsutum
ctacacgagaaaat

SEQ ID NO: 15056 - DNA, 31 bp, Gossypium hirsutum
aacataactttagtggattcatccagtcatt

SEQ ID NO: 15057 - DNA, 23 bp, Gossypium hirsutum
tgcaaaaccatgctgttgaaaca

SEQ ID NO: 15058 - DNA, 21 bp, Gossypium hirsutum
acaaagtaaatcagttatctc

SEQ ID NO: 15059 - DNA, 20 bp, Gossypium hirsutum
caaagtaaatcaattatctc

SEQ ID NO: 15060 - DNA, 24 bp, Gossypium hirsutum
agtcagcgggaataattggtttct

SEQ ID NO: 15061 - DNA, 26 bp, Gossypium hirsutum
gccgtttttgcataacttgttctttt

SEQ ID NO: 15062 - DNA, 25 bp, Gossypium hirsutum
atagattttgatttttttttctttc

SEQ ID NO: 15063 - DNA, 24 bp, Gossypium hirsutum
atagattttgattttttttctttc

SEQ ID NO: 15064 - DNA, 29 bp, Gossypium hirsutum
gcattcaagaaagatacctacacaagtgt

SEQ ID NO: 15065 - DNA, 32 bp, Gossypium hirsutum
ctgagatctaagaagactaaactcgataacat

SEQ ID NO: 15066 - DNA, 18 bp, Gossypium hirsutum
aagagcttgccctattga

SEQ ID NO: 15067 - DNA, 18 bp, Gossypium hirsutum
aagagcttgccctgttga

SEQ ID NO: 15068 - DNA, 24 bp, Gossypium hirsutum
gagttggagagtgtacttcaagca

SEQ ID NO: 15069 - DNA, 24 bp, Gossypium hirsutum
cctcagatgtaccaaacacaggtt

SEQ ID NO: 15070 - DNA, 19 bp, Gossypium hirsutum
aatttcattgccatgtttt

SEQ ID NO: 15071 - DNA, 20 bp, Gossypium hirsutum
caatttcattgctatgtttt

SEQ ID NO: 15072 - DNA, 25 bp, Gossypium hirsutum
tgagaggccaaattagccaatgtaa

SEQ ID NO: 15073 - DNA, 27 bp, Gossypium hirsutum
gatacgacctttcacatacatgtctgt

SEQ ID NO: 15074 - DNA, 18 bp, Gossypium hirsutum
tctaacagtgacgttcaa

SEQ ID NO: 15075 - DNA, 15 bp, Gossypium hirsutum
aacagtggcgttcaa

SEQ ID NO: 15076 - DNA, 25 bp, Gossypium hirsutum
gcatgcaagttatattacgagaggc

SEQ ID NO: 15077 - DNA, 23 bp, Gossypium hirsutum
cggcatacacacagtacatttgg

SEQ ID NO: 15078 - DNA, 17 bp, Gossypium hirsutum
cttcccaaaaattttac

SEQ ID NO: 15079 - DNA, 16 bp, Gossypium hirsutum
ttcccaaaagttttac

SEQ ID NO: 15080 - DNA, 26 bp, Gossypium hirsutum
tcttctgggatgaacactgaataggt

SEQ ID NO: 15081 - DNA, 25 bp, Gossypium hirsutum
gcatccagctattaggtgcttgtta

SEQ ID NO: 15082 - DNA, 22 bp, Gossypium hirsutum
atgatattgtttctctactttt

SEQ ID NO: 15083 - DNA, 22 bp, Gossypium hirsutum
atgatattgtttctttactttt

SEQ ID NO: 15084 - DNA, 29 bp, Gossypium hirsutum
ggatggagaattattgcgatgaaaatgaa

SEQ ID NO: 15085 - DNA, 23 bp, Gossypium hirsutum
gcttgtctagttcagccatctgt

SEQ ID NO: 15086 - DNA, 19 bp, Gossypium hirsutum
tcagcatctttgattatga

SEQ ID NO: 15087 - DNA, 18 bp, Gossypium hirsutum
cagcatctttggttatga

SEQ ID NO: 15088 - DNA, 21 bp, Gossypium hirsutum
tcaaccttgccaggcaaagaa

SEQ ID NO: 15089 - DNA, 27 bp, Gossypium hirsutum
cgtactctatattttggaagcgtgtgt

SEQ ID NO: 15090 - DNA, 21 bp, Gossypium hirsutum
tcactaaaataagagatattc

SEQ ID NO: 15091 - DNA, 22 bp, Gossypium hirsutum
atcactaaaataagatatattc

SEQ ID NO: 15092 - DNA, 32 bp, Gossypium hirsutum
cctagggatgagatcaatccttaaatctttag

SEQ ID NO: 15093 - DNA, 25 bp, Gossypium hirsutum
gccactcatcttccttattccttct

SEQ ID NO: 15094 - DNA, 19 bp, Gossypium hirsutum
attttacaaccagaatcaa

SEQ ID NO: 15095 - DNA, 18 bp, Gossypium hirsutum
ttttacaaccaaaatcaa

SEQ ID NO: 15096 - DNA, 25 bp, Gossypium hirsutum
gccctgcaatgaaatgatacaatga

SEQ ID NO: 15097 - DNA, 25 bp, Gossypium hirsutum
cgtgtatctctccataagcattgca

SEQ ID NO: 15098 - DNA, 18 bp, Gossypium hirsutum
atatacatcgaggaactc

SEQ ID NO: 15099 - DNA, 16 bp, Gossypium hirsutum
atacatcgtggaactc

SEQ ID NO: 15100 - DNA, 25 bp, Gossypium hirsutum
agcaaggcaaaatttgagtacgttt

SEQ ID NO: 15101 - DNA, 23 bp, Gossypium hirsutum
gttggcagagctcttttcacatc

SEQ ID NO: 15102 - DNA, 15 bp, Gossypium hirsutum
ccgggtttcagaatt

SEQ ID NO: 15103 - DNA, 15 bp, Gossypium hirsutum
ccgggtttaagaatt

SEQ ID NO: 15104 - DNA, 29 bp, Gossypium hirsutum
gcagctagctaacatattcttcaaaaaca

SEQ ID NO: 15105 - DNA, 23 bp, Gossypium hirsutum
agggcttttggctgagttagaaa

SEQ ID NO: 15106 - DNA, 20 bp, Gossypium hirsutum
cccattcttcttcttcttta

SEQ ID NO: 15107 - DNA, 19 bp, Gossypium hirsutum
ccattcttcttcgtcttta

SEQ ID NO: 15108 - DNA, 21 bp, Gossypium hirsutum
ctctcagccttcccactttca

SEQ ID NO: 15109 - DNA, 28 bp, Gossypium hirsutum
tccttgattttccatttcttgtgtttgg

SEQ ID NO: 15110 - DNA, 16 bp, Gossypium hirsutum
agagcaaaagaaaaga

SEQ ID NO: 15111 - DNA, 16 bp, Gossypium hirsutum
agagcaaaaaaaaaga

SEQ ID NO: 15112 - DNA, 25 bp, Gossypium hirsutum
cggagtttggacaatggattagaga

SEQ ID NO: 15113 - DNA, 30 bp, Gossypium hirsutum
ttcctcatgcatttcaacaaaaaaattgtg

SEQ ID NO: 15114 - DNA, 17 bp, Gossypium hirsutum
cttacccttgttctttc

SEQ ID NO: 15115 - DNA, 18 bp, Gossypium hirsutum
tcttaccctttttctttc

SEQ ID NO: 15116 - DNA, 27 bp, Gossypium hirsutum
catcaatgaatggcaatttgacaacac

SEQ ID NO: 15117 - DNA, 29 bp, Gossypium hirsutum
agttcctgaaagcaaaaaaatatcagcaa

SEQ ID NO: 15118 - DNA, 16 bp, Gossypium hirsutum
cagagaagcgatctta

SEQ ID NO: 15119 - DNA, 16 bp, Gossypium hirsutum
cagagaagcaatctta

SEQ ID NO: 15120 - DNA, 27 bp, Gossypium hirsutum
gtccgtaacattgggatctttagttgt

SEQ ID NO: 15121 - DNA, 25 bp, Gossypium hirsutum
gcgaggatgaagtgagtattatgct

SEQ ID NO: 15122 - DNA, 17 bp, Gossypium hirsutum
atggactcacaccctta

SEQ ID NO: 15123 - DNA, 17 bp, Gossypium hirsutum
atggactcaaaccctta

SEQ ID NO: 15124 - DNA, 22 bp, Gossypium hirsutum
cgcggtctctattttccccttt

SEQ ID NO: 15125 - DNA, 24 bp, Gossypium hirsutum
cccactgaattgagctgtaatgca

SEQ ID NO: 15126 - DNA, 19 bp, Gossypium hirsutum
ctgaggaagacatatgaca

SEQ ID NO: 15127 - DNA, 20 bp, Gossypium hirsutum
tctgaggaagatatatgaca

SEQ ID NO: 15128 - DNA, 19 bp, Gossypium hirsutum
ctgccatgtgggtctagca

SEQ ID NO: 15129 - DNA, 24 bp, Gossypium hirsutum
gcattctctgaccgtgtcttgatc

SEQ ID NO: 15130 - DNA, 15 bp, Gossypium hirsutum
tccatcgctggccgg

SEQ ID NO: 15131 - DNA, 15 bp, Gossypium hirsutum
tccatcgttggccgg

SEQ ID NO: 15132 - DNA, 14 bp, Gossypium hirsutum
ggccagcccaccgt

SEQ ID NO: 15133 - DNA, 20 bp, Gossypium hirsutum
aaacaccgccaaggtcaaga

SEQ ID NO: 15134 - DNA, 18 bp, Gossypium hirsutum
caaaatagaggtcttgcc

SEQ ID NO: 15135 - DNA, 18 bp, Gossypium hirsutum
caaaatagagatcttgcc

SEQ ID NO: 15136 - DNA, 36 bp, Gossypium hirsutum
ctactcatatacatctagtgactaaaaacaatgtcc

SEQ ID NO: 15137 - DNA, 35 bp, Gossypium hirsutum
tcagttttattaaatttgatccaatttcagttcgt

SEQ ID NO: 15138 - DNA, 21 bp, Gossypium hirsutum
atcagtttttaaaatttttct

SEQ ID NO: 15139 - DNA, 21 bp, Gossypium hirsutum
atcagtttttaaaatctttct

SEQ ID NO: 15140 - DNA, 27 bp, Gossypium hirsutum
ccgaattccaattatttggaccagttt

SEQ ID NO: 15141 - DNA, 32 bp, Gossypium hirsutum
accctttccccttttttatatatctttatgca

SEQ ID NO: 15142 - DNA, 23 bp, Gossypium hirsutum
aaaagaaaaaaaaacgatgaaca

SEQ ID NO: 15143 - DNA, 21 bp, Gossypium hirsutum
aaagaaaaaaaacgatgaaca

SEQ ID NO: 15144 - DNA, 24 bp, Gossypium hirsutum
gaaacaatcggaggcaaacatctt

SEQ ID NO: 15145 - DNA, 22 bp, Gossypium hirsutum
gcggtgttttccttatcaacgt

SEQ ID NO: 15146 - DNA, 19 bp, Gossypium hirsutum
ttaatcgattcgatcaatc

SEQ ID NO: 15147 - DNA, 16 bp, Gossypium hirsutum
atcgattcgaccaatc

SEQ ID NO: 15148 - DNA, 25 bp, Gossypium hirsutum
ttgagcaacgaaagtgaaaaccaaa

SEQ ID NO: 15149 - DNA, 34 bp, Gossypium hirsutum
cattgtgttatttttgttttgaaaaaaggaaagc

SEQ ID NO: 15150 - DNA, 20 bp, Gossypium hirsutum
agatgcagaatatgctccta

SEQ ID NO: 15151 - DNA, 21 bp, Gossypium hirsutum
aagatgcagaatatactccta

SEQ ID NO: 15152 - DNA, 23 bp, Gossypium hirsutum
caccacactttttcagccttctc

SEQ ID NO: 15153 - DNA, 25 bp, Gossypium hirsutum
cgaaaatccatggaaaacactggtt

SEQ ID NO: 15154 - DNA, 13 bp, Gossypium hirsutum
cggaggcgttttt

SEQ ID NO: 15155 - DNA, 13 bp, Gossypium hirsutum
cggaggagttttt

SEQ ID NO: 15156 - DNA, 25 bp, Gossypium hirsutum
acgtcggagaaatcatgatcatcag

SEQ ID NO: 15157 - DNA, 26 bp, Gossypium hirsutum
ggcccatagtacacaacaaaaaagtc

SEQ ID NO: 15158 - DNA, 16 bp, Gossypium hirsutum
atattgaacaaaaacc

SEQ ID NO: 15159 - DNA, 16 bp, Gossypium hirsutum
atattgaacgaaaacc

SEQ ID NO: 15160 - DNA, 31 bp, Gossypium hirsutum
tggattctaatatggattttttacagtggct

SEQ ID NO: 15161 - DNA, 25 bp, Gossypium hirsutum
tcggtggcatgatctttattcttgt

SEQ ID NO: 15162 - DNA, 15 bp, Gossypium hirsutum
ccagcggtgcagtaa

SEQ ID NO: 15163 - DNA, 16 bp, Gossypium hirsutum
accagcgatgcagtaa

SEQ ID NO: 15164 - DNA, 27 bp, Gossypium hirsutum
gtcatggtttagattgccgtacttttt

SEQ ID NO: 15165 - DNA, 22 bp, Gossypium hirsutum
cttgaggaagcggatgaacact

SEQ ID NO: 15166 - DNA, 14 bp, Gossypium hirsutum
ccatgggaaggctt

SEQ ID NO: 15167 - DNA, 14 bp, Gossypium hirsutum
ccatgagaaggctt

SEQ ID NO: 15168 - DNA, 22 bp, Gossypium hirsutum
gcaggagcacgaaaatgaatgg

SEQ ID NO: 15169 - DNA, 32 bp, Gossypium hirsutum
tgtatttgaatctcagttattctgggaagatg

SEQ ID NO: 15170 - DNA, 20 bp, Gossypium hirsutum
caaggataaaacaatttgaa

SEQ ID NO: 15171 - DNA, 19 bp, Gossypium hirsutum
aaggataaaacaaattgaa

SEQ ID NO: 15172 - DNA, 29 bp, Gossypium hirsutum
caatgacaactttatctgcaaaacaatgg

SEQ ID NO: 15173 - DNA, 41 bp, Gossypium hirsutum
gttcctttttattattcttattttattgttgttttgtgtgt

SEQ ID NO: 15174 - DNA, 22 bp, Gossypium hirsutum
aaaaaatgaaaaaaaaataaag

SEQ ID NO: 15175 - DNA, 21 bp, Gossypium hirsutum
aaaaaatgaaaaaaaataaag

SEQ ID NO: 15176 - DNA, 30 bp, Gossypium hirsutum
ttgagtttcgattttcatcctttttcactt

SEQ ID NO: 15177 - DNA, 23 bp, Gossypium hirsutum
ggctagatctttcgtctcgtgat

SEQ ID NO: 15178 - DNA, 13 bp, Gossypium hirsutum
ccgtgcaatctta

SEQ ID NO: 15179 - DNA, 13 bp, Gossypium hirsutum
ccgtgcgatctta

SEQ ID NO: 15180 - DNA, 22 bp, Gossypium hirsutum
gcgagtttggatgaacgaatcg

SEQ ID NO: 15181 - DNA, 32 bp, Gossypium hirsutum
ttctttctagtcgaactcaaataagtcatgtt

SEQ ID NO: 15182 - DNA, 16 bp, Gossypium hirsutum
accggtgtcctattta

SEQ ID NO: 15183 - DNA, 15 bp, Gossypium hirsutum
ccggtgtgctattta

SEQ ID NO: 15184 - DNA, 28 bp, Gossypium hirsutum
tccaatgaggattttgtcttttgactct

SEQ ID NO: 15185 - DNA, 26 bp, Gossypium hirsutum
gcaggagcactgagcatttatatact

SEQ ID NO: 15186 - DNA, 20 bp, Gossypium hirsutum
cttgtgagcatagtcatata

SEQ ID NO: 15187 - DNA, 20 bp, Gossypium hirsutum
cttgtgagcatagtcgtata

SEQ ID NO: 15188 - DNA, 30 bp, Gossypium hirsutum
ctagaactgatgccaaattgtgttaaaagt

SEQ ID NO: 15189 - DNA, 25 bp, Gossypium hirsutum
ccttttctgccgtgattgtattgtt

SEQ ID NO: 15190 - DNA, 21 bp, Gossypium hirsutum
caagtgagaattaaaatatta

SEQ ID NO: 15191 - DNA, 20 bp, Gossypium hirsutum
aagtgagaattaaaagatta

SEQ ID NO: 15192 - DNA, 25 bp, Gossypium hirsutum
ccttctacccttctcacctgacata

SEQ ID NO: 15193 - DNA, 24 bp, Gossypium hirsutum
gcaggcttcatcctttcctcttaa

SEQ ID NO: 15194 - DNA, 14 bp, Gossypium hirsutum
ttgcccgtaagtgc

SEQ ID NO: 15195 - DNA, 17 bp, Gossypium hirsutum
attttgcccttaagtgc

SEQ ID NO: 15196 - DNA, 25 bp, Gossypium hirsutum
cccattaacgttcatgcatgctaaa

SEQ ID NO: 15197 - DNA, 31 bp, Gossypium hirsutum
gttcgagagagagtatttcttctgttatctt

SEQ ID NO: 15198 - DNA, 17 bp, Gossypium hirsutum
acatgccacttgaacaa

SEQ ID NO: 15199 - DNA, 16 bp, Gossypium hirsutum
catgccacatgaacaa

SEQ ID NO: 15200 - DNA, 29 bp, Gossypium hirsutum
agcacaatacaagtcaattcgataacagt

SEQ ID NO: 15201 - DNA, 28 bp, Gossypium hirsutum
cattcccatattctctgtttcttctcga

SEQ ID NO: 15202 - DNA, 20 bp, Gossypium hirsutum
ccatacattaccatgcattt

SEQ ID NO: 15203 - DNA, 19 bp, Gossypium hirsutum
catacattaccttgcattt

SEQ ID NO: 15204 - DNA, 37 bp, Gossypium hirsutum
ttgccacaaattagaaaaacataattgaatatcatct

SEQ ID NO: 15205 - DNA, 23 bp, Gossypium hirsutum
gctttgggttgcacttattttgc

SEQ ID NO: 15206 - DNA, 18 bp, Gossypium hirsutum
tcagtgaaattagaatgc

SEQ ID NO: 15207 - DNA, 17 bp, Gossypium hirsutum
cagtgaaattggaatgc

SEQ ID NO: 15208 - DNA, 21 bp, Gossypium hirsutum
gctgtgcgacacgattttctc

SEQ ID NO: 15209 - DNA, 25 bp, Gossypium hirsutum
cagtccatcagcaggaggttataaa

SEQ ID NO: 15210 - DNA, 26 bp, Gossypium hirsutum
ttttgaagataatataagttgaccgc

SEQ ID NO: 15211 - DNA, 25 bp, Gossypium hirsutum
tttgaagataatataagttgacagc

SEQ ID NO: 15212 - DNA, 25 bp, Gossypium hirsutum
ttgagcgctagcccttgttaattat

SEQ ID NO: 15213 - DNA, 28 bp, Gossypium hirsutum
cgataacaccaagaaaactaaccccttt

SEQ ID NO: 15214 - DNA, 19 bp, Gossypium hirsutum
atcataatgcaccttttat

SEQ ID NO: 15215 - DNA, 16 bp, Gossypium hirsutum
ataatgcgccttttat

SEQ ID NO: 15216 - DNA, 29 bp, Gossypium hirsutum
ccccttcactttactgaactaatcaaaga

SEQ ID NO: 15217 - DNA, 25 bp, Gossypium hirsutum
gctgcaaagaagcatcctgatctat

SEQ ID NO: 15218 - DNA, 17 bp, Gossypium hirsutum
ttaagtgctgaggttct

SEQ ID NO: 15219 - DNA, 15 bp, Gossypium hirsutum
aagtgctcaggttct

SEQ ID NO: 15220 - DNA, 26 bp, Gossypium hirsutum
tcatctacactggcttgaaaaaggaa

SEQ ID NO: 15221 - DNA, 25 bp, Gossypium hirsutum
tttccagggcctttctaatccaaat

SEQ ID NO: 15222 - DNA, 16 bp, Gossypium hirsutum
ttgctggatcgcctcg

SEQ ID NO: 15223 - DNA, 16 bp, Gossypium hirsutum
ttgctggatcacctcg

SEQ ID NO: 15224 - DNA, 25 bp, Gossypium hirsutum
gagccagcaggatctgtacaaatta

SEQ ID NO: 15225 - DNA, 35 bp, Gossypium hirsutum
tccttttacatttccattgtatctacaactacttt

SEQ ID NO: 15226 - DNA, 25 bp, Gossypium hirsutum
ctaaactcttaaataaaaaaataat

SEQ ID NO: 15227 - DNA, 24 bp, Gossypium hirsutum
taaactcttaaataaaaagataat

SEQ ID NO: 15228 - DNA, 35 bp, Gossypium hirsutum
gatttaaccttagtttaattgacatgattgatgct

SEQ ID NO: 15229 - DNA, 18 bp, Gossypium hirsutum
aagtgcacgcccctctag

SEQ ID NO: 15230 - DNA, 19 bp, Gossypium hirsutum
tcgtctggtaatgttgaat

SEQ ID NO: 15231 - DNA, 19 bp, Gossypium hirsutum
tcgtctggtaatattgaat

SEQ ID NO: 15232 - DNA, 25 bp, Gossypium hirsutum
gcagaaggtacaccagatgctaata

SEQ ID NO: 15233 - DNA, 25 bp, Gossypium hirsutum
tcaggcaattagcacatacacttca

SEQ ID NO: 15234 - DNA, 20 bp, Gossypium hirsutum
ctagagaaatagagaaagtc

SEQ ID NO: 15235 - DNA, 20 bp, Gossypium hirsutum
ctagagaaatagaggaagtc

SEQ ID NO: 15236 - DNA, 21 bp, Gossypium hirsutum
cttcagcgtcagctctaacgt

SEQ ID NO: 15237 - DNA, 26 bp, Gossypium hirsutum
gttaatgttttagggtgctctttgct

SEQ ID NO: 15238 - DNA, 25 bp, Gossypium hirsutum
ccagtattatttttaaaaaacattt

SEQ ID NO: 15239 - DNA, 23 bp, Gossypium hirsutum
agtattatttttaaaaaaaattt

SEQ ID NO: 15240 - DNA, 27 bp, Gossypium hirsutum
gcacgagtagataatgcaaaacagatc

SEQ ID NO: 15241 - DNA, 25 bp, Gossypium hirsutum
ggcgagcaataaacatagaagcaaa

SEQ ID NO: 15242 - DNA, 16 bp, Gossypium hirsutum
ccgcattgtcttttat

SEQ ID NO: 15243 - DNA, 16 bp, Gossypium hirsutum
ccgcattgttttttat

SEQ ID NO: 15244 - DNA, 30 bp, Gossypium hirsutum
cttcattatcggtgatagatttgtggtcat

SEQ ID NO: 15245 - DNA, 24 bp, Gossypium hirsutum
cccggacaagtaatggtgacatat

SEQ ID NO: 15246 - DNA, 17 bp, Gossypium hirsutum
actggctgtctacaaaa

SEQ ID NO: 15247 - DNA, 15 bp, Gossypium hirsutum
tggctgtctgcaaaa

SEQ ID NO: 15248 - DNA, 19 bp, Gossypium hirsutum
cctgcaactgcccagattg

SEQ ID NO: 15249 - DNA, 26 bp, Gossypium hirsutum
cagaagttcgaccctagtaagtgttc

SEQ ID NO: 15250 - DNA, 14 bp, Gossypium hirsutum
aatcgcgaatccct

SEQ ID NO: 15251 - DNA, 14 bp, Gossypium hirsutum
aatcgcaaatccct

SEQ ID NO: 15252 - DNA, 25 bp, Gossypium hirsutum
ctgatcatctgcatttcaccaaaca

SEQ ID NO: 15253 - DNA, 35 bp, Gossypium hirsutum
agtttgctatttaaaaacagacatataggtaggtt

SEQ ID NO: 15254 - DNA, 20 bp, Gossypium hirsutum
aaatttggaatcaaataaaa

SEQ ID NO: 15255 - DNA, 20 bp, Gossypium hirsutum
taaatttggaatcaataaaa

SEQ ID NO: 15256 - DNA, 28 bp, Gossypium hirsutum
gggtgaattggtaaaatttaaaggaggt

SEQ ID NO: 15257 - DNA, 32 bp, Gossypium hirsutum
ggaactttactcaattaccataatgggaagaa

SEQ ID NO: 15258 - DNA, 23 bp, Gossypium hirsutum
attaatgtgaagtaaagtatatg

SEQ ID NO: 15259 - DNA, 22 bp, Gossypium hirsutum
ttaatgtgaagtaaaatatatg

SEQ ID NO: 15260 - DNA, 26 bp, Gossypium hirsutum
atacaataccgtaaaagacggcgtat

SEQ ID NO: 15261 - DNA, 22 bp, Gossypium hirsutum
acccgaaccttgtcgaaattga

SEQ ID NO: 15262 - DNA, 17 bp, Gossypium hirsutum
cttgtcgtacgtccatc

SEQ ID NO: 15263 - DNA, 17 bp, Gossypium hirsutum
cttgtcgtatgtccatc

SEQ ID NO: 15264 - DNA, 28 bp, Gossypium hirsutum
tgtgggtaaggtagagggatatttcttt

SEQ ID NO: 15265 - DNA, 31 bp, Gossypium hirsutum
tgggaggtaaatatttctgtcttaattgcat

SEQ ID NO: 15266 - DNA, 16 bp, Gossypium hirsutum
cctttgtcgattttta

SEQ ID NO: 15267 - DNA, 16 bp, Gossypium hirsutum
cctttgtcggttttta

SEQ ID NO: 15268 - DNA, 22 bp, Gossypium hirsutum
tgtgacaaggtcccgacaaaat

SEQ ID NO: 15269 - DNA, 25 bp, Gossypium hirsutum
ctgtaactctgctgcaatttcactt

SEQ ID NO: 15270 - DNA, 23 bp, Gossypium hirsutum
ctttcctatttgtatatctaatc

SEQ ID NO: 15271 - DNA, 22 bp, Gossypium hirsutum
tttcctatttgtataactaatc

SEQ ID NO: 15272 - DNA, 35 bp, Gossypium hirsutum
gggtctatctttctttctttcttaatcttctttca

SEQ ID NO: 15273 - DNA, 24 bp, Gossypium hirsutum
agccaatcggttgataatgagcat

SEQ ID NO: 15274 - DNA, 19 bp, Gossypium hirsutum
ccgtaatgaaaagtaagtg

SEQ ID NO: 15275 - DNA, 19 bp, Gossypium hirsutum
ccgtaatgaaaactaagtg

SEQ ID NO: 15276 - DNA, 26 bp, Gossypium hirsutum
actgcaagttcaagtaagttcaatgc

SEQ ID NO: 15277 - DNA, 47 bp, Gossypium hirsutum
cctagaacctaagtttgagagttatggatatttatttataatagtta

SEQ ID NO: 15278 - DNA, 22 bp, Gossypium hirsutum
ataaatttaatgcaccattaat

SEQ ID NO: 15279 - DNA, 19 bp, Gossypium hirsutum
aatttaatgcaccatcaat

SEQ ID NO: 15280 - DNA, 37 bp, Gossypium hirsutum
atggattaaatcaataattttcgtacaacacaatgat

SEQ ID NO: 15281 - DNA, 25 bp, Gossypium hirsutum
ggaagaaaagggtggtccaacatat

SEQ ID NO: 15282 - DNA, 15 bp, Gossypium hirsutum
cagaaagtgaaattc

SEQ ID NO: 15283 - DNA, 15 bp, Gossypium hirsutum
cagaaagagaaattc

SEQ ID NO: 15284 - DNA, 24 bp, Gossypium hirsutum
gccttccattgctataggtgcata

SEQ ID NO: 15285 - DNA, 25 bp, Gossypium hirsutum
cctgcaattggaggaagaaaaggat

SEQ ID NO: 15286 - DNA, 15 bp, Gossypium hirsutum
caagcggctgtggac

SEQ ID NO: 15287 - DNA, 15 bp, Gossypium hirsutum
caagcgactgtggac

SEQ ID NO: 15288 - DNA, 29 bp, Gossypium hirsutum
cttcttcaactaggagaaacatacgatca

SEQ ID NO: 15289 - DNA, 37 bp, Gossypium hirsutum
atctgtgaaatacatgaacaatataaactcaaacatg

SEQ ID NO: 15290 - DNA, 15 bp, Gossypium hirsutum
tcggacgggttcata

SEQ ID NO: 15291 - DNA, 14 bp, Gossypium hirsutum
cggacggattcata

SEQ ID NO: 15292 - DNA, 27 bp, Gossypium hirsutum
gctgcaatggtaatggagcaatataat

SEQ ID NO: 15293 - DNA, 31 bp, Gossypium hirsutum
gagctttctttaattgttttctgaaggagtt

SEQ ID NO: 15294 - DNA, 19 bp, Gossypium hirsutum
ttcatttcgctctctcttt

SEQ ID NO: 15295 - DNA, 14 bp, Gossypium hirsutum
ttcgctcgctcttt

SEQ ID NO: 15296 - DNA, 38 bp, Gossypium hirsutum
aaacaatgaaaaaaggaaaaactaaattcaaataagca

SEQ ID NO: 15297 - DNA, 39 bp, Gossypium hirsutum
gtttgtaaaatgattcactttagtttatgaaatttaccc

SEQ ID NO: 15298 - DNA, 22 bp, Gossypium hirsutum
cttttttaggtcaagattgtat

SEQ ID NO: 15299 - DNA, 22 bp, Gossypium hirsutum
cttttttaggtcaagtttgtat

SEQ ID NO: 15300 - DNA, 25 bp, Gossypium hirsutum
acgagatggctggaaaagtacattc

SEQ ID NO: 15301 - DNA, 27 bp, Gossypium hirsutum
ccagaaccaatgtaagaatgaggatca

SEQ ID NO: 15302 - DNA, 18 bp, Gossypium hirsutum
cctggaaaaatattaacc

SEQ ID NO: 15303 - DNA, 18 bp, Gossypium hirsutum
cctggaaaaatgttaacc

SEQ ID NO: 15304 - DNA, 33 bp, Gossypium hirsutum
cttacattcaatgaaaatttgagaactgtagct

SEQ ID NO: 15305 - DNA, 25 bp, Gossypium hirsutum
catgggaatgggatcttcatcttca

SEQ ID NO: 15306 - DNA, 18 bp, Gossypium hirsutum
tttcttgctctttacccc

SEQ ID NO: 15307 - DNA, 17 bp, Gossypium hirsutum
ttcttgctctctacccc

SEQ ID NO: 15308 - DNA, 30 bp, Gossypium hirsutum
tcattaaaagatcaaaggtcagaggatctg

SEQ ID NO: 15309 - DNA, 25 bp, Gossypium hirsutum
ggacaaccggaaggtgaaatttaac

SEQ ID NO: 15310 - DNA, 21 bp, Gossypium hirsutum
aatatcaatggtaatattatc

SEQ ID NO: 15311 - DNA, 20 bp, Gossypium hirsutum
atatcaatggtactattatc

SEQ ID NO: 15312 - DNA, 26 bp, Gossypium hirsutum
agattggaagttttagggttctcgtg

SEQ ID NO: 15313 - DNA, 26 bp, Gossypium hirsutum
atgcttcatcacatactcccttttgt

SEQ ID NO: 15314 - DNA, 23 bp, Gossypium hirsutum
tatggatagatattctttttttt

SEQ ID NO: 15315 - DNA, 21 bp, Gossypium hirsutum
tggatagatattcttgttttt

SEQ ID NO: 15316 - DNA, 33 bp, Gossypium hirsutum
acatctaaagtctctaatttagctaagcttgtc

SEQ ID NO: 15317 - DNA, 30 bp, Gossypium hirsutum
ggatgagtactatgttcaatggaaacatca

SEQ ID NO: 15318 - DNA, 16 bp, Gossypium hirsutum
cccattgacgagccca

SEQ ID NO: 15319 - DNA, 15 bp, Gossypium hirsutum
ccattgacaagccca

SEQ ID NO: 15320 - DNA, 16 bp, Gossypium hirsutum
gctccaccccccatgt

SEQ ID NO: 15321 - DNA, 26 bp, Gossypium hirsutum
ggacaaatttggcattgttcttctca

SEQ ID NO: 15322 - DNA, 16 bp, Gossypium hirsutum
tgacttggtaagaaac

SEQ ID NO: 15323 - DNA, 14 bp, Gossypium hirsutum
acttggaaagaaac

SEQ ID NO: 15324 - DNA, 25 bp, Gossypium hirsutum
cgcagcagtacaaaactagtagctt

SEQ ID NO: 15325 - DNA, 40 bp, Gossypium hirsutum
ctttaaatcaattattgaattgaacgaacaaataaactga

SEQ ID NO: 15326 - DNA, 25 bp, Gossypium hirsutum
tgttctttatactgaataattcgaa

SEQ ID NO: 15327 - DNA, 23 bp, Gossypium hirsutum
ttctttatactgaataattccaa

SEQ ID NO: 15328 - DNA, 34 bp, Gossypium hirsutum
tgggatcaatttagggtctatgattttaaaagag

SEQ ID NO: 15329 - DNA, 23 bp, Gossypium hirsutum
gctttgcttttccggaacttgaa

SEQ ID NO: 15330 - DNA, 20 bp, Gossypium hirsutum
ctgaaatggttgtccgcgaa

SEQ ID NO: 15331 - DNA, 19 bp, Gossypium hirsutum
tgaaatggttgtccccgaa

SEQ ID NO: 15332 - DNA, 28 bp, Gossypium hirsutum
caagccagagatattagttactgatgct

SEQ ID NO: 15333 - DNA, 25 bp, Gossypium hirsutum
ctctcacacctaccttccatacatg

SEQ ID NO: 15334 - DNA, 18 bp, Gossypium hirsutum
caactaatgctaagttct

SEQ ID NO: 15335 - DNA, 16 bp, Gossypium hirsutum
actaatgccaagttct

SEQ ID NO: 15336 - DNA, 20 bp, Gossypium hirsutum
tgtgtgccacaatggagtga

SEQ ID NO: 15337 - DNA, 24 bp, Gossypium hirsutum
ggacctctgtcaccatctaaacct

SEQ ID NO: 15338 - DNA, 16 bp, Gossypium hirsutum
cttctcctcataagcc

SEQ ID NO: 15339 - DNA, 17 bp, Gossypium hirsutum
acttctcctcctaagcc

SEQ ID NO: 15340 - DNA, 18 bp, Gossypium hirsutum
tggcggtttaggcacctt

SEQ ID NO: 15341 - DNA, 26 bp, Gossypium hirsutum
gcctttcatggcaaaactgttaaaac

SEQ ID NO: 15342 - DNA, 16 bp, Gossypium hirsutum
aacaaacgaaacctca

SEQ ID NO: 15343 - DNA, 17 bp, Gossypium hirsutum
aaacaaacgatacctca

SEQ ID NO: 15344 - DNA, 27 bp, Gossypium hirsutum
ttgtattctattgtggcaatccaacct

SEQ ID NO: 15345 - DNA, 24 bp, Gossypium hirsutum
ccacacattttccatgctgtagtg

SEQ ID NO: 15346 - DNA, 16 bp, Gossypium hirsutum
ccccaacgactgtgtc

SEQ ID NO: 15347 - DNA, 16 bp, Gossypium hirsutum
ccccaatgactgtgtc

SEQ ID NO: 15348 - DNA, 26 bp, Gossypium hirsutum
tgtttcagaaaggacctaatgttgct

SEQ ID NO: 15349 - DNA, 27 bp, Gossypium hirsutum
cctttactggtacggaaaatcatgttg

SEQ ID NO: 15350 - DNA, 16 bp, Gossypium hirsutum
atgaggcccctcccat

SEQ ID NO: 15351 - DNA, 17 bp, Gossypium hirsutum
catgaggcctctcccat

SEQ ID NO: 15352 - DNA, 23 bp, Gossypium hirsutum
gtctttacacctggaaggatgct

SEQ ID NO: 15353 - DNA, 29 bp, Gossypium hirsutum
ggactttccaatgaaattataccaatgcg

SEQ ID NO: 15354 - DNA, 19 bp, Gossypium hirsutum
ctcgatagaaatgcctcct

SEQ ID NO: 15355 - DNA, 18 bp, Gossypium hirsutum
tcgatagaaatggctcct

SEQ ID NO: 15356 - DNA, 25 bp, Gossypium hirsutum
gccttcgtacagatcctacaatcat

SEQ ID NO: 15357 - DNA, 28 bp, Gossypium hirsutum
ctcatggccttgtttttacctgatttat

SEQ ID NO: 15358 - DNA, 16 bp, Gossypium hirsutum
acagttgctcatatct

SEQ ID NO: 15359 - DNA, 16 bp, Gossypium hirsutum
acagttgctcgtatct

SEQ ID NO: 15360 - DNA, 25 bp, Gossypium hirsutum
catccatctccatgtgttcattcca

SEQ ID NO: 15361 - DNA, 23 bp, Gossypium hirsutum
ccgaggtatacgggcaagaaaag

SEQ ID NO: 15362 - DNA, 16 bp, Gossypium hirsutum
atgaatgcccaattaa

SEQ ID NO: 15363 - DNA, 13 bp, Gossypium hirsutum
aatgcgcaattaa

SEQ ID NO: 15364 - DNA, 25 bp, Gossypium hirsutum
ggtttcggccctttacttaagttct

SEQ ID NO: 15365 - DNA, 24 bp, Gossypium hirsutum
gatcccagcggaaaatttcagttt

SEQ ID NO: 15366 - DNA, 16 bp, Gossypium hirsutum
ccctgcattgggagat

SEQ ID NO: 15367 - DNA, 16 bp, Gossypium hirsutum
ccctgcatttggagat

SEQ ID NO: 15368 - DNA, 27 bp, Gossypium hirsutum
acattaccgaaagaatggaaaccttca

SEQ ID NO: 15369 - DNA, 21 bp, Gossypium hirsutum
ttttgccaatcccgactggta

SEQ ID NO: 15370 - DNA, 18 bp, Gossypium hirsutum
cagccatttacatgttac

SEQ ID NO: 15371 - DNA, 18 bp, Gossypium hirsutum
cagccatttacgtgttac

SEQ ID NO: 15372 - DNA, 22 bp, Gossypium hirsutum
gcatatccaggagacctgcatt

SEQ ID NO: 15373 - DNA, 26 bp, Gossypium hirsutum
gggacatccaagaggtatggtttttt

SEQ ID NO: 15374 - DNA, 22 bp, Gossypium hirsutum
tcaaagaaatgagttaaagata

SEQ ID NO: 15375 - DNA, 19 bp, Gossypium hirsutum
aagaaatgagtgaaagata

SEQ ID NO: 15376 - DNA, 22 bp, Gossypium hirsutum
gcagcaaaagagaagacatgca

SEQ ID NO: 15377 - DNA, 19 bp, Gossypium hirsutum
cgccatactggagcagtgt

SEQ ID NO: 15378 - DNA, 17 bp, Gossypium hirsutum
ccttgatgagggaagaa

SEQ ID NO: 15379 - DNA, 16 bp, Gossypium hirsutum
cttgatgaggaaagaa

SEQ ID NO: 15380 - DNA, 24 bp, Gossypium hirsutum
gttgggaggagaaactacgaactc

SEQ ID NO: 15381 - DNA, 21 bp, Gossypium hirsutum
tgggccaacccaactcaaaaa

SEQ ID NO: 15382 - DNA, 25 bp, Gossypium hirsutum
tttacttttcttaaattgagttggg

SEQ ID NO: 15383 - DNA, 25 bp, Gossypium hirsutum
tttacttttcttaaattgagttagg

SEQ ID NO: 15384 - DNA, 20 bp, Gossypium hirsutum
gccgattaggtcaggtccaa

SEQ ID NO: 15385 - DNA, 24 bp, Gossypium hirsutum
cttaaccatggcagcttctcattt

SEQ ID NO: 15386 - DNA, 18 bp, Gossypium hirsutum
atgttcacatctaaactt

SEQ ID NO: 15387 - DNA, 20 bp, Gossypium hirsutum
caatgttcacatctagactt

SEQ ID NO: 15388 - DNA, 28 bp, Gossypium hirsutum
gaggctggactgagtattaagtttaagt

SEQ ID NO: 15389 - DNA, 37 bp, Gossypium hirsutum
ctcactgtttttcacatgaaaatgaaattttattcaa

SEQ ID NO: 15390 - DNA, 23 bp, Gossypium hirsutum
catcaaacttcatatatataaat

SEQ ID NO: 15391 - DNA, 20 bp, Gossypium hirsutum
caaacttcatataaataaat

SEQ ID NO: 15392 - DNA, 28 bp, Gossypium hirsutum
ctttagaaattgtagtctagccgatgct

SEQ ID NO: 15393 - DNA, 35 bp, Gossypium hirsutum
agaactcaaatatagttctttgtgaagaacattca

SEQ ID NO: 15394 - DNA, 17 bp, Gossypium hirsutum
cataggagaaaaacttg

SEQ ID NO: 15395 - DNA, 17 bp, Gossypium hirsutum
cataggagaaagacttg

SEQ ID NO: 15396 - DNA, 25 bp, Gossypium hirsutum
ttgcaacctcactcccttacaatta

SEQ ID NO: 15397 - DNA, 28 bp, Gossypium hirsutum
aggttcatgaagactctttcaaagttca

SEQ ID NO: 15398 - DNA, 15 bp, Gossypium hirsutum
ctcaggagaaaaact

SEQ ID NO: 15399 - DNA, 14 bp, Gossypium hirsutum
ctcaggagaaaact

SEQ ID NO: 15400 - DNA, 25 bp, Gossypium hirsutum
gcaacaagcctttatgcaatggtaa

SEQ ID NO: 15401 - DNA, 25 bp, Gossypium hirsutum
cagcctgtaggtgttaaccacaata

SEQ ID NO: 15402 - DNA, 18 bp, Gossypium hirsutum
agggaaaaaaaaatcctt

SEQ ID NO: 15403 - DNA, 17 bp, Gossypium hirsutum
agggaaaaaaaatcctt

SEQ ID NO: 15404 - DNA, 27 bp, Gossypium hirsutum
gaaagcttgtagaatgcaatgatcact

SEQ ID NO: 15405 - DNA, 26 bp, Gossypium hirsutum
aatttcttcttagccttgtggaggag

SEQ ID NO: 15406 - DNA, 26 bp, Gossypium hirsutum
ttgaagttatataattaacgacttac

SEQ ID NO: 15407 - DNA, 25 bp, Gossypium hirsutum
tgaagttatataattaacgacctac

SEQ ID NO: 15408 - DNA, 26 bp, Gossypium hirsutum
cctgaacacttaaacttaccccatga

SEQ ID NO: 15409 - DNA, 33 bp, Gossypium hirsutum
ggaagataagattttgttatttggttgatggaa

SEQ ID NO: 15410 - DNA, 25 bp, Gossypium hirsutum
ataaattaccaacttttatattatt

SEQ ID NO: 15411 - DNA, 23 bp, Gossypium hirsutum
aaattaccaacttttttattatt

SEQ ID NO: 15412 - DNA, 43 bp, Gossypium hirsutum
ttcccttatttatttatttatcattttggtcaaatttaccttt

SEQ ID NO: 15413 - DNA, 27 bp, Gossypium hirsutum
ctgcaaaacaggaaacaatagaatgga

SEQ ID NO: 15414 - DNA, 18 bp, Gossypium hirsutum
actggaaaagaaacattt

SEQ ID NO: 15415 - DNA, 16 bp, Gossypium hirsutum
tggaaaagcaacattt

SEQ ID NO: 15416 - DNA, 45 bp, Gossypium hirsutum
tgaatactaatttctttcataatttgttttcgttttattatctca

SEQ ID NO: 15417 - DNA, 33 bp, Gossypium hirsutum
tcttgaagtactcgatatctagatggtaaaagt

SEQ ID NO: 15418 - DNA, 22 bp, Gossypium hirsutum
tcaactcttaatatagaggttg

SEQ ID NO: 15419 - DNA, 21 bp, Gossypium hirsutum
caactcttaatatagagattg

SEQ ID NO: 15420 - DNA, 46 bp, Gossypium hirsutum
actctttaataaaacgactaatttatctatttttttaatagaggga

SEQ ID NO: 15421 - DNA, 24 bp, Gossypium hirsutum
accagtttcaatcatgtccaccat

SEQ ID NO: 15422 - DNA, 19 bp, Gossypium hirsutum
ctgtttcaccttacctatc

SEQ ID NO: 15423 - DNA, 19 bp, Gossypium hirsutum
ctgtttcacctttcctatc

SEQ ID NO: 15424 - DNA, 30 bp, Gossypium hirsutum
tttgcttattgtacagttattggtgctcta

SEQ ID NO: 15425 - DNA, 20 bp, Gossypium hirsutum
caccaatttcggctgcatca

SEQ ID NO: 15426 - DNA, 18 bp, Gossypium hirsutum
cctatgccagattgcgat

SEQ ID NO: 15427 - DNA, 17 bp, Gossypium hirsutum
ctatgccagagtgcgat

SEQ ID NO: 15428 - DNA, 25 bp, Gossypium hirsutum
ctccatggacttggtgaatcctaaa

SEQ ID NO: 15429 - DNA, 25 bp, Gossypium hirsutum
ggtcctcgttctcagtgaagtaatt

SEQ ID NO: 15430 - DNA, 18 bp, Gossypium hirsutum
tttttgtaccctgctttt

SEQ ID NO: 15431 - DNA, 16 bp, Gossypium hirsutum
tttgtaccgtgctttt

SEQ ID NO: 15432 - DNA, 25 bp, Gossypium hirsutum
gcaagaaaatcaagttcggtggaaa

SEQ ID NO: 15433 - DNA, 25 bp, Gossypium hirsutum
cgacataatgtccatgtaggagcaa

SEQ ID NO: 15434 - DNA, 16 bp, Gossypium hirsutum
aaacaggtgggatcac

SEQ ID NO: 15435 - DNA, 16 bp, Gossypium hirsutum
aaacaggtaggatcac

SEQ ID NO: 15436 - DNA, 21 bp, Gossypium hirsutum
gcttactttccccgtgtctct

SEQ ID NO: 15437 - DNA, 23 bp, Gossypium hirsutum
ggcgttatattgtgctgcatagg

SEQ ID NO: 15438 - DNA, 18 bp, Gossypium hirsutum
ctcaatcatctgcttatg

SEQ ID NO: 15439 - DNA, 19 bp, Gossypium hirsutum
cctcaatcatctacttatg

SEQ ID NO: 15440 - DNA, 22 bp, Gossypium hirsutum
gacaagcagaatcaggtttgca

SEQ ID NO: 15441 - DNA, 31 bp, Gossypium hirsutum
gttatgttaccgattattctgtgacaagagt

SEQ ID NO: 15442 - DNA, 18 bp, Gossypium hirsutum
ttctcggaatacataaac

SEQ ID NO: 15443 - DNA, 19 bp, Gossypium hirsutum
attctcgaaatacataaac

SEQ ID NO: 15444 - DNA, 32 bp, Gossypium hirsutum
aaatacctgtgtttgatatctgtgttcaaaac

SEQ ID NO: 15445 - DNA, 25 bp, Gossypium hirsutum
ggcaaaagatgactccagtatacca

SEQ ID NO: 15446 - DNA, 18 bp, Gossypium hirsutum
ccactggatatctaaaag

SEQ ID NO: 15447 - DNA, 17 bp, Gossypium hirsutum
cactggatgtctaaaag

SEQ ID NO: 15448 - DNA, 32 bp, Gossypium hirsutum
tgatcatgctgggaaattcaaatataacttct

SEQ ID NO: 15449 - DNA, 23 bp, Gossypium hirsutum
ccttctggcaaaagcttgtaagc

SEQ ID NO: 15450 - DNA, 21 bp, Gossypium hirsutum
ctgaaggaactacctaccgga

SEQ ID NO: 15451 - DNA, 18 bp, Gossypium hirsutum
aaggaactaccgaccgga

SEQ ID NO: 15452 - DNA, 25 bp, Gossypium hirsutum
gcctaatgctatggctctggtaaaa

SEQ ID NO: 15453 - DNA, 27 bp, Gossypium hirsutum
agagagcagaaattaagacgagagaga

SEQ ID NO: 15454 - DNA, 21 bp, Gossypium hirsutum
ctaacctgaattaactttttt

SEQ ID NO: 15455 - DNA, 18 bp, Gossypium hirsutum
acctgaattaaatttttt

SEQ ID NO: 15456 - DNA, 30 bp, Gossypium hirsutum
tggacataagagtaaaaggaatggaaaagg

SEQ ID NO: 15457 - DNA, 27 bp, Gossypium hirsutum
ggaacttccagaatatccccaactttt

SEQ ID NO: 15458 - DNA, 21 bp, Gossypium hirsutum
cttacttaaaggtaatccctg

SEQ ID NO: 15459 - DNA, 17 bp, Gossypium hirsutum
cttaaaggtgatccctg

SEQ ID NO: 15460 - DNA, 22 bp, Gossypium hirsutum
tggtcctacttctcctgcaaga

SEQ ID NO: 15461 - DNA, 27 bp, Gossypium hirsutum
tgatggatgatgattcggagttttgaa

SEQ ID NO: 15462 - DNA, 22 bp, Gossypium hirsutum
ttcgaactataatgaaagtaaa

SEQ ID NO: 15463 - DNA, 21 bp, Gossypium hirsutum
ttcgaactataatgaagtaaa

SEQ ID NO: 15464 - DNA, 25 bp, Gossypium hirsutum
ggttccggtagaaattgacagttgt

SEQ ID NO: 15465 - DNA, 43 bp, Gossypium hirsutum
caatcaatttcatacacatgtacccattataattgtataataa

SEQ ID NO: 15466 - DNA, 21 bp, Gossypium hirsutum
ataaaacataccccataacag

SEQ ID NO: 15467 - DNA, 19 bp, Gossypium hirsutum
aaaacataccccgtaacag

SEQ ID NO: 15468 - DNA, 26 bp, Gossypium hirsutum
gatgtattcctgttttgtctgtgcaa

SEQ ID NO: 15469 - DNA, 21 bp, Gossypium hirsutum
gtgctttcgtcaaccggaaaa

SEQ ID NO: 15470 - DNA, 19 bp, Gossypium hirsutum
ctctcaagaacacgactga

SEQ ID NO: 15471 - DNA, 18 bp, Gossypium hirsutum
tctcaagaacaagactga

SEQ ID NO: 15472 - DNA, 21 bp, Gossypium hirsutum
gacacgaattccaccgttctc

SEQ ID NO: 15473 - DNA, 25 bp, Gossypium hirsutum
gacctcaaaacaaaacatgcagtga

SEQ ID NO: 15474 - DNA, 13 bp, Gossypium hirsutum
ccccctcaccccc

SEQ ID NO: 15475 - DNA, 13 bp, Gossypium hirsutum
cccccttaccccc

SEQ ID NO: 15476 - DNA, 26 bp, Gossypium hirsutum
gctacttcacctgtaggatttcaaga

SEQ ID NO: 15477 - DNA, 29 bp, Gossypium hirsutum
accatgcttgaaaataagaaccaagtttc

SEQ ID NO: 15478 - DNA, 17 bp, Gossypium hirsutum
acctgtttaggaatgtt

SEQ ID NO: 15479 - DNA, 17 bp, Gossypium hirsutum
acctgtttaagaatgtt

SEQ ID NO: 15480 - DNA, 24 bp, Gossypium hirsutum
cgaatcagaggtttcactgctcat

SEQ ID NO: 15481 - DNA, 30 bp, Gossypium hirsutum
tccaaatacgaataccaaagagattgttgt

SEQ ID NO: 15482 - DNA, 19 bp, Gossypium hirsutum
tccaatttcaacgtacctt

SEQ ID NO: 15483 - DNA, 18 bp, Gossypium hirsutum
ccaatttcaacatacctt

SEQ ID NO: 15484 - DNA, 34 bp, Gossypium hirsutum
agaaaaaaacaaaaacaaaaacctttagtagggt

SEQ ID NO: 15485 - DNA, 34 bp, Gossypium hirsutum
tcaattttggtttaaatttgtaagaggtgtttgt

SEQ ID NO: 15486 - DNA, 22 bp, Gossypium hirsutum
aataaaacaatacaggattaaa

SEQ ID NO: 15487 - DNA, 22 bp, Gossypium hirsutum
aataaaacaatacaagattaaa

SEQ ID NO: 15488 - DNA, 28 bp, Gossypium hirsutum
tctcgcaaaattagatgaagggatcaaa

SEQ ID NO: 15489 - DNA, 25 bp, Gossypium hirsutum
gccttctgtttcggagactatgaat

SEQ ID NO: 15490 - DNA, 17 bp, Gossypium hirsutum
ccggacataactggcca

SEQ ID NO: 15491 - DNA, 16 bp, Gossypium hirsutum
cggacatagctggcca

SEQ ID NO: 15492 - DNA, 25 bp, Gossypium hirsutum
ccagtgatgagtaaatccaccagtt

SEQ ID NO: 15493 - DNA, 30 bp, Gossypium hirsutum
aggtttatttcacttttgagtactggtgtt

SEQ ID NO: 15494 - DNA, 23 bp, Gossypium hirsutum
ttccttcatatcatttattattt

SEQ ID NO: 15495 - DNA, 20 bp, Gossypium hirsutum
cttcatatcatttgttattt

SEQ ID NO: 15496 - DNA, 33 bp, Gossypium hirsutum
tgatagtgagatattctacctaaattaccgcat

SEQ ID NO: 15497 - DNA, 35 bp, Gossypium hirsutum
aatcttcagaagtttattcaattcattgtggaaat

SEQ ID NO: 15498 - DNA, 15 bp, Gossypium hirsutum
ttgaagccaaacgca

SEQ ID NO: 15499 - DNA, 17 bp, Gossypium hirsutum
ctttgaagcctaacgca

SEQ ID NO: 15500 - DNA, 32 bp, Gossypium hirsutum
gcaaaccaaaattaaataatcccaatattgcc

SEQ ID NO: 15501 - DNA, 25 bp, Gossypium hirsutum
tggctttcaggcatcaattagaaga

SEQ ID NO: 15502 - DNA, 21 bp, Gossypium hirsutum
tcctatcaaatacgatgaact

SEQ ID NO: 15503 - DNA, 20 bp, Gossypium hirsutum
cctatcaaatacaatgaact

SEQ ID NO: 15504 - DNA, 29 bp, Gossypium hirsutum
gcttcatcaactagataaagtttgctgtt

SEQ ID NO: 15505 - DNA, 23 bp, Gossypium hirsutum
gtgcaaaaggtgtgtaagcaact

SEQ ID NO: 15506 - DNA, 14 bp, Gossypium hirsutum
cacagggaaaagat

SEQ ID NO: 15507 - DNA, 13 bp, Gossypium hirsutum
acagggcaaagat

SEQ ID NO: 15508 - DNA, 25 bp, Gossypium hirsutum
agcccaaaaagaccttgaaagagat

SEQ ID NO: 15509 - DNA, 27 bp, Gossypium hirsutum
ccttgtatcgttttaaggtctttctgc

SEQ ID NO: 15510 - DNA, 24 bp, Gossypium hirsutum
ctttataaatcagactattccatc

SEQ ID NO: 15511 - DNA, 22 bp, Gossypium hirsutum
ttataaatcagactgttccatc

SEQ ID NO: 15512 - DNA, 34 bp, Gossypium hirsutum
tgcaatacctttatgaaatttagcaattttgtga

SEQ ID NO: 15513 - DNA, 25 bp, Gossypium hirsutum
ggcctgagcttgaattccattattt

SEQ ID NO: 15514 - DNA, 21 bp, Gossypium hirsutum
caatataatttcccaagttag

SEQ ID NO: 15515 - DNA, 21 bp, Gossypium hirsutum
caatataatttcccgagttag

SEQ ID NO: 15516 - DNA, 25 bp, Gossypium hirsutum
gcatcgaaagtggtcaatcaaatca

SEQ ID NO: 15517 - DNA, 24 bp, Gossypium hirsutum
ccagttcccatcaagcaatctttt

SEQ ID NO: 15518 - DNA, 17 bp, Gossypium hirsutum
ctgtcccatcttccatc

SEQ ID NO: 15519 - DNA, 17 bp, Gossypium hirsutum
ctgtcccatattccatc

SEQ ID NO: 15520 - DNA, 24 bp, Gossypium hirsutum
catctcaccaggtattgtcttcca

SEQ ID NO: 15521 - DNA, 25 bp, Gossypium hirsutum
ggcacagttacaaaaaccatgatga

SEQ ID NO: 15522 - DNA, 18 bp, Gossypium hirsutum
ctctgaatggaaatacat

SEQ ID NO: 15523 - DNA, 16 bp, Gossypium hirsutum
ctgaatggcaatacat

SEQ ID NO: 15524 - DNA, 25 bp, Gossypium hirsutum
gccggaatcatgtaattggaacttc

SEQ ID NO: 15525 - DNA, 28 bp, Gossypium hirsutum
ggcataaaggtacatcttgcttattctg

SEQ ID NO: 15526 - DNA, 18 bp, Gossypium hirsutum
ccaattgctcgtataaga

SEQ ID NO: 15527 - DNA, 17 bp, Gossypium hirsutum
ccaattgctgtataaga

SEQ ID NO: 15528 - DNA, 37 bp, Gossypium hirsutum
tcatacttgataggaatgaaatcatcatctaaacaaa

SEQ ID NO: 15529 - DNA, 30 bp, Gossypium hirsutum
cgggtttctaattttcactcctaaaaagtc

SEQ ID NO: 15530 - DNA, 21 bp, Gossypium hirsutum
ttttcataagagttcaattta

SEQ ID NO: 15531 - DNA, 17 bp, Gossypium hirsutum
cataagagctcaattta

SEQ ID NO: 15532 - DNA, 37 bp, Gossypium hirsutum
atttttattaacaaaagctaagggtttaattgagtgt

SEQ ID NO: 15533 - DNA, 27 bp, Gossypium hirsutum
tgtttgtatgattggcttgtgatctgt

SEQ ID NO: 15534 - DNA, 21 bp, Gossypium hirsutum
cagatattactatgaacctgc

SEQ ID NO: 15535 - DNA, 20 bp, Gossypium hirsutum
agatattactatgagcctgc

SEQ ID NO: 15536 - DNA, 32 bp, Gossypium hirsutum
tccgagaacaattaaataagaagctatgaaca

SEQ ID NO: 15537 - DNA, 23 bp, Gossypium hirsutum
cggtttctggaccaaaagatcga

SEQ ID NO: 15538 - DNA, 18 bp, Gossypium hirsutum
aatggcaatactgggaaa

SEQ ID NO: 15539 - DNA, 19 bp, Gossypium hirsutum
caatggcaataatgggaaa

SEQ ID NO: 15540 - DNA, 25 bp, Gossypium hirsutum
actatcttcacctaggtaggccaaa

SEQ ID NO: 15541 - DNA, 28 bp, Gossypium hirsutum
gaatcaggtaggagtatcaactttccaa

SEQ ID NO: 15542 - DNA, 16 bp, Gossypium hirsutum
cagagcagcagtacat

SEQ ID NO: 15543 - DNA, 15 bp, Gossypium hirsutum
agagcagcaatacat

SEQ ID NO: 15544 - DNA, 24 bp, Gossypium hirsutum
acaagaccgaccaagaaaagagtt

SEQ ID NO: 15545 - DNA, 26 bp, Gossypium hirsutum
aagctccatgcaagaattgaatatgc

SEQ ID NO: 15546 - DNA, 21 bp, Gossypium hirsutum
caagttccttcaaaatacagt

SEQ ID NO: 15547 - DNA, 20 bp, Gossypium hirsutum
aagttccttcaagatacagt

SEQ ID NO: 15548 - DNA, 26 bp, Gossypium hirsutum
ctccttgaattttgaacctcctttgc

SEQ ID NO: 15549 - DNA, 42 bp, Gossypium hirsutum
tgaaataacttacatataattgagtcacattagtaaaaggaa

SEQ ID NO: 15550 - DNA, 18 bp, Gossypium hirsutum
catgaatgcttcataaat

SEQ ID NO: 15551 - DNA, 18 bp, Gossypium hirsutum
catgaatgctacataaat

SEQ ID NO: 15552 - DNA, 46 bp, Gossypium hirsutum
gcatcaatacaaatgtataaatgtatcaaaatttatataagacgaa

SEQ ID NO: 15553 - DNA, 24 bp, Gossypium hirsutum
ttggactcggttacaaatgttgga

SEQ ID NO: 15554 - DNA, 20 bp, Gossypium hirsutum
catggatattagagagtctt

SEQ ID NO: 15555 - DNA, 20 bp, Gossypium hirsutum
catggatattagagcgtctt

SEQ ID NO: 15556 - DNA, 25 bp, Gossypium hirsutum
cctacccaattgacaggattacctt

SEQ ID NO: 15557 - DNA, 23 bp, Gossypium hirsutum
ggagcattggcatagtgtactgt

SEQ ID NO: 15558 - DNA, 17 bp, Gossypium hirsutum
ctactgtccggtctaat

SEQ ID NO: 15559 - DNA, 18 bp, Gossypium hirsutum
actactgtccagtctaat

SEQ ID NO: 15560 - DNA, 25 bp, Gossypium hirsutum
gccaaggatttggaagatagctcaa

SEQ ID NO: 15561 - DNA, 28 bp, Gossypium hirsutum
gtggaacatacacagtaaaaagcatcaa

SEQ ID NO: 15562 - DNA, 16 bp, Gossypium hirsutum
tcagcttgttaattct

SEQ ID NO: 15563 - DNA, 16 bp, Gossypium hirsutum
tcagcttcttaattct

SEQ ID NO: 15564 - DNA, 25 bp, Gossypium hirsutum
gtcactgctacttgtggtgcttata

SEQ ID NO: 15565 - DNA, 26 bp, Gossypium hirsutum
cgaaagacaccctttatcatctctgt

SEQ ID NO: 15566 - DNA, 16 bp, Gossypium hirsutum
cagagaacgagagaac

SEQ ID NO: 15567 - DNA, 16 bp, Gossypium hirsutum
cagagaacaagagaac

SEQ ID NO: 15568 - DNA, 25 bp, Gossypium hirsutum
gtcaattgccgtagcttcagataag

SEQ ID NO: 15569 - DNA, 23 bp, Gossypium hirsutum
gtgaccgcggttactgttactaa

SEQ ID NO: 15570 - DNA, 19 bp, Gossypium hirsutum
aagaggatcatgatatcta

SEQ ID NO: 15571 - DNA, 19 bp, Gossypium hirsutum
aagaggatcatgatgtcta

SEQ ID NO: 15572 - DNA, 26 bp, Gossypium hirsutum
tgtgcaaatctcaaatcatgcttcac

SEQ ID NO: 15573 - DNA, 25 bp, Gossypium hirsutum
gccaggacatacttgagttatgttg

SEQ ID NO: 15574 - DNA, 17 bp, Gossypium hirsutum
caagtcctaagaaagag

SEQ ID NO: 15575 - DNA, 17 bp, Gossypium hirsutum
caagtcctatgaaagag

SEQ ID NO: 15576 - DNA, 31 bp, Gossypium hirsutum
gcttcacaagattgtcattaatggtttacaa

SEQ ID NO: 15577 - DNA, 29 bp, Gossypium hirsutum
aaactaaggtcatatatctaggcaccagt

SEQ ID NO: 15578 - DNA, 17 bp, Gossypium hirsutum
ctctcttctaaaagggc

SEQ ID NO: 15579 - DNA, 15 bp, Gossypium hirsutum
ctcttctgaaagggc

SEQ ID NO: 15580 - DNA, 25 bp, Gossypium hirsutum
ctgctgacaagtatcacggtaacat

SEQ ID NO: 15581 - DNA, 25 bp, Gossypium hirsutum
tgcatccagaggaaatttagcaaga

SEQ ID NO: 15582 - DNA, 17 bp, Gossypium hirsutum
acttgtacgagatatct

SEQ ID NO: 15583 - DNA, 18 bp, Gossypium hirsutum
tacttgtacaagatatct

SEQ ID NO: 15584 - DNA, 27 bp, Gossypium hirsutum
ttgcaccagaaattctcaaggtagatt

SEQ ID NO: 15585 - DNA, 25 bp, Gossypium hirsutum
gtggattccaactctttgctgtttc

SEQ ID NO: 15586 - DNA, 17 bp, Gossypium hirsutum
ctttgccacttcaggtg

SEQ ID NO: 15587 - DNA, 17 bp, Gossypium hirsutum
ctttgccactacaggtg

SEQ ID NO: 15588 - DNA, 27 bp, Gossypium hirsutum
caaaagaaaactcaggaccaatgttca

SEQ ID NO: 15589 - DNA, 40 bp, Gossypium hirsutum
catcatagatctctataacttcataatgtttaacacaaag

SEQ ID NO: 15590 - DNA, 18 bp, Gossypium hirsutum
caaggtactcaacaggca

SEQ ID NO: 15591 - DNA, 17 bp, Gossypium hirsutum
aaggtactcgacaggca

SEQ ID NO: 15592 - DNA, 25 bp, Gossypium hirsutum
gatctgaatgtctcctggttcgtaa

SEQ ID NO: 15593 - DNA, 31 bp, Gossypium hirsutum
gaaaaacaatccacatgaagttttccataga

SEQ ID NO: 15594 - DNA, 17 bp, Gossypium hirsutum
catgttgtgtttttttc

SEQ ID NO: 15595 - DNA, 16 bp, Gossypium hirsutum
catgttgtgttttttc

SEQ ID NO: 15596 - DNA, 23 bp, Gossypium hirsutum
gctgggcataaagtttggatgtt

SEQ ID NO: 15597 - DNA, 23 bp, Gossypium hirsutum
actggagagcacccactatactc

SEQ ID NO: 15598 - DNA, 18 bp, Gossypium hirsutum
tctcgttgaagatgagag

SEQ ID NO: 15599 - DNA, 18 bp, Gossypium hirsutum
tctcgttgaaaatgagag

SEQ ID NO: 15600 - DNA, 23 bp, Gossypium hirsutum
ctgtcgcttgtcaactcatgaag

SEQ ID NO: 15601 - DNA, 25 bp, Gossypium hirsutum
gcatccctccacttcaatatcagat

SEQ ID NO: 15602 - DNA, 14 bp, Gossypium hirsutum
cggctggagcacgt

SEQ ID NO: 15603 - DNA, 14 bp, Gossypium hirsutum
cggctgaagcacgt

SEQ ID NO: 15604 - DNA, 25 bp, Gossypium hirsutum
tctgtgcttctgtcaaagagatgag

SEQ ID NO: 15605 - DNA, 26 bp, Gossypium hirsutum
tggctactatcctgccagtaattaca

SEQ ID NO: 15606 - DNA, 22 bp, Gossypium hirsutum
caagagggttaaatagctgcaa

SEQ ID NO: 15607 - DNA, 21 bp, Gossypium hirsutum
aagagggttaaataactgcaa

SEQ ID NO: 15608 - DNA, 29 bp, Gossypium hirsutum
caatgcatgaagatttttagatgggatga

SEQ ID NO: 15609 - DNA, 29 bp, Gossypium hirsutum
gaaagcaaaacttctcatgcaaaatttga

SEQ ID NO: 15610 - DNA, 21 bp, Gossypium hirsutum
tcaagtgttctttcttatttt

SEQ ID NO: 15611 - DNA, 21 bp, Gossypium hirsutum
tcaagtgttcttttttatttt

SEQ ID NO: 15612 - DNA, 34 bp, Gossypium hirsutum
ggtaaattggtttttttgttaaattcgatagtgt

SEQ ID NO: 15613 - DNA, 25 bp, Gossypium hirsutum
ggtgaggccttgacagttgaaatta

SEQ ID NO: 15614 - DNA, 20 bp, Gossypium hirsutum
tgatcaaagattggcgacac

SEQ ID NO: 15615 - DNA, 21 bp, Gossypium hirsutum
aatgatcaaagattgcgacac

SEQ ID NO: 15616 - DNA, 25 bp, Gossypium hirsutum
gcaactgaaaaccaagtctctgaga

SEQ ID NO: 15617 - DNA, 37 bp, Gossypium hirsutum
cacattaattatttgaagaatcaacctataccatgat

SEQ ID NO: 15618 - DNA, 16 bp, Gossypium hirsutum
cttgcctctagatgac

SEQ ID NO: 15619 - DNA, 17 bp, Gossypium hirsutum
tcttgcctatagatgac

SEQ ID NO: 15620 - DNA, 20 bp, Gossypium hirsutum
cgcctggtgattcggtttga

SEQ ID NO: 15621 - DNA, 19 bp, Gossypium hirsutum
cttggtaggtggctgtgct

SEQ ID NO: 15622 - DNA, 16 bp, Gossypium hirsutum
tgtgatgcctagtttc

SEQ ID NO: 15623 - DNA, 14 bp, Gossypium hirsutum
tgatgcctggtttc

SEQ ID NO: 15624 - DNA, 31 bp, Gossypium hirsutum
ccttttcatttcacacaaatcatatcaggat

SEQ ID NO: 15625 - DNA, 25 bp, Gossypium hirsutum
tgaacctagccttgttgaatacaca

SEQ ID NO: 15626 - DNA, 16 bp, Gossypium hirsutum
tcgagtctgaagaaaa

SEQ ID NO: 15627 - DNA, 16 bp, Gossypium hirsutum
tcgagtctgaataaaa

SEQ ID NO: 15628 - DNA, 24 bp, Gossypium hirsutum
tcaagcacccaaattcgagtttct

SEQ ID NO: 15629 - DNA, 27 bp, Gossypium hirsutum
actagaatcggaagacaatttggtgtt

SEQ ID NO: 15630 - DNA, 18 bp, Gossypium hirsutum
cagttgaaacagtctgat

SEQ ID NO: 15631 - DNA, 17 bp, Gossypium hirsutum
agttgaaacggtctgat

SEQ ID NO: 15632 - DNA, 31 bp, Gossypium hirsutum
aagaatgtgaagaaagtatagtcgttgaaca

SEQ ID NO: 15633 - DNA, 25 bp, Gossypium hirsutum
ggatactttttgccttgatgcttca

SEQ ID NO: 15634 - DNA, 15 bp, Gossypium hirsutum
cattgtgccagatcc

SEQ ID NO: 15635 - DNA, 14 bp, Gossypium hirsutum
attgtgccggatcc

SEQ ID NO: 15636 - DNA, 25 bp, Gossypium hirsutum
agtacttggcaatggatcgaaaaca

SEQ ID NO: 15637 - DNA, 31 bp, Gossypium hirsutum
ggcttcgcctgcaaagttatttaaattatta

SEQ ID NO: 15638 - DNA, 24 bp, Gossypium hirsutum
atataagtgaaaaaaaaattaaag

SEQ ID NO: 15639 - DNA, 21 bp, Gossypium hirsutum
ataagtgaaaaaaaattaaag

SEQ ID NO: 15640 - DNA, 34 bp, Gossypium hirsutum
aagattgttgaattgactattgactattgagaca

SEQ ID NO: 15641 - DNA, 28 bp, Gossypium hirsutum
gaacttgctattataccatgtttctggc

SEQ ID NO: 15642 - DNA, 20 bp, Gossypium hirsutum
atttaatcctcatattttct

SEQ ID NO: 15643 - DNA, 20 bp, Gossypium hirsutum
atttaatcctcattttttct

SEQ ID NO: 15644 - DNA, 25 bp, Gossypium hirsutum
gaaattccacttagggtagctgact

SEQ ID NO: 15645 - DNA, 28 bp, Gossypium hirsutum
tgaactgaatcatgaatccatcaagtgt

SEQ ID NO: 15646 - DNA, 21 bp, Gossypium hirsutum
tttaatgtttgagagtaactc

SEQ ID NO: 15647 - DNA, 18 bp, Gossypium hirsutum
aatgtttgagaataactc

SEQ ID NO: 15648 - DNA, 25 bp, Gossypium hirsutum
agttagctcgacaagatggtcaaat

SEQ ID NO: 15649 - DNA, 22 bp, Gossypium hirsutum
ccctggtatccaacggtcattc

SEQ ID NO: 15650 - DNA, 22 bp, Gossypium hirsutum
cagatagatattgagtcccctc

SEQ ID NO: 15651 - DNA, 19 bp, Gossypium hirsutum
atagatattgagtgccctc

SEQ ID NO: 15652 - DNA, 22 bp, Gossypium hirsutum
ggtctcacctggagagttggaa

SEQ ID NO: 15653 - DNA, 25 bp, Gossypium hirsutum
tctccacttttgaactttgaatgcg

SEQ ID NO: 15654 - DNA, 16 bp, Gossypium hirsutum
accgtgcttagtcact

SEQ ID NO: 15655 - DNA, 15 bp, Gossypium hirsutum
ccgtgctaagtcact

SEQ ID NO: 15656 - DNA, 24 bp, Gossypium hirsutum
acttgtgctttcgtgacatactgt

SEQ ID NO: 15657 - DNA, 23 bp, Gossypium hirsutum
gagactgcgcaaaatcactcatg

SEQ ID NO: 15658 - DNA, 15 bp, Gossypium hirsutum
tctgttgcgattaac

SEQ ID NO: 15659 - DNA, 18 bp, Gossypium hirsutum
ctatctgttacgattaac

SEQ ID NO: 15660 - DNA, 32 bp, Gossypium hirsutum
ctatgcacgtaattgtacaaaatattggttgt

SEQ ID NO: 15661 - DNA, 22 bp, Gossypium hirsutum
tgacttgctcaatggcataggg

SEQ ID NO: 15662 - DNA, 15 bp, Gossypium hirsutum
cttcttgaaattttc

SEQ ID NO: 15663 - DNA, 15 bp, Gossypium hirsutum
cttcttgaatttttc

SEQ ID NO: 15664 - DNA, 24 bp, Gossypium hirsutum
catgcaaagcacacaccatagaag

SEQ ID NO: 15665 - DNA, 25 bp, Gossypium hirsutum
ctctccgtcttccatagatgtcatg

SEQ ID NO: 15666 - DNA, 16 bp, Gossypium hirsutum
caaccagaacttgtcg

SEQ ID NO: 15667 - DNA, 16 bp, Gossypium hirsutum
caaccagaatttgtcg

SEQ ID NO: 15668 - DNA, 24 bp, Gossypium hirsutum
acagttttgtggtttctgggtctt

SEQ ID NO: 15669 - DNA, 20 bp, Gossypium hirsutum
tgccaacaaccatgcagtct

SEQ ID NO: 15670 - DNA, 15 bp, Gossypium hirsutum
ctcaaccagcattgc

SEQ ID NO: 15671 - DNA, 15 bp, Gossypium hirsutum
ctcaaccaacattgc

SEQ ID NO: 15672 - DNA, 25 bp, Gossypium hirsutum
gcttggtcagctcaactctctttta

SEQ ID NO: 15673 - DNA, 24 bp, Gossypium hirsutum
tcaattcctggttgcatcttgtgt

SEQ ID NO: 15674 - DNA, 17 bp, Gossypium hirsutum
ctttgcctctgcagaac

SEQ ID NO: 15675 - DNA, 15 bp, Gossypium hirsutum
ttgcctcagcagaac

SEQ ID NO: 15676 - DNA, 27 bp, Gossypium hirsutum
acaattgatctctgtgaagactctcct

SEQ ID NO: 15677 - DNA, 24 bp, Gossypium hirsutum
caggaaaaacaggctccctatact

SEQ ID NO: 15678 - DNA, 16 bp, Gossypium hirsutum
cagtactccgaaccag

SEQ ID NO: 15679 - DNA, 16 bp, Gossypium hirsutum
cagtactccaaaccag

SEQ ID NO: 15680 - DNA, 25 bp, Gossypium hirsutum
cccctggtactcactttttcattgt

SEQ ID NO: 15681 - DNA, 30 bp, Gossypium hirsutum
tgaacatactcgcattagttacattcttgt

SEQ ID NO: 15682 - DNA, 15 bp, Gossypium hirsutum
cacccgagaatgagt

SEQ ID NO: 15683 - DNA, 19 bp, Gossypium hirsutum
tttacacccgagtatgagt

SEQ ID NO: 15684 - DNA, 28 bp, Gossypium hirsutum
aaggattgcatttatagacttggagcat

SEQ ID NO: 15685 - DNA, 28 bp, Gossypium hirsutum
gttcggtaacaaatcctgttgaaatgtt

SEQ ID NO: 15686 - DNA, 19 bp, Gossypium hirsutum
ttcaactttgtgtttttgt

SEQ ID NO: 15687 - DNA, 19 bp, Gossypium hirsutum
ttcaactttgtgtatttgt

SEQ ID NO: 15688 - DNA, 32 bp, Gossypium hirsutum
atcattctaccatttgaaaggtcagagataag

SEQ ID NO: 15689 - DNA, 20 bp, Gossypium hirsutum
gcctcctcacaggtgtctct

SEQ ID NO: 15690 - DNA, 13 bp, Gossypium hirsutum
ctgcccaaaggca

SEQ ID NO: 15691 - DNA, 13 bp, Gossypium hirsutum
ctgccaaaaggca

SEQ ID NO: 15692 - DNA, 27 bp, Gossypium hirsutum
tgctttatcttcttgtcatgtgtccaa

SEQ ID NO: 15693 - DNA, 19 bp, Gossypium hirsutum
gggaccaccatgacaagca

SEQ ID NO: 15694 - DNA, 14 bp, Gossypium hirsutum
caccaccgcgactc

SEQ ID NO: 15695 - DNA, 14 bp, Gossypium hirsutum
caccacggcgactc

SEQ ID NO: 15696 - DNA, 19 bp, Gossypium hirsutum
ccgaacgacggtgggaatc

SEQ ID NO: 15697 - DNA, 29 bp, Gossypium hirsutum
acaatccaatacacctgatttttgtacct

SEQ ID NO: 15698 - DNA, 19 bp, Gossypium hirsutum
atgcatttttctgagattt

SEQ ID NO: 15699 - DNA, 21 bp, Gossypium hirsutum
atatgcatttttatgagattt

SEQ ID NO: 15700 - DNA, 36 bp, Gossypium hirsutum
ctaaagttataagaagaatttattcaggcacaagag

SEQ ID NO: 15701 - DNA, 27 bp, Gossypium hirsutum
ctccgcgtgcttacttttttaaagaaa

SEQ ID NO: 15702 - DNA, 17 bp, Gossypium hirsutum
ttttgagctgataaatt

SEQ ID NO: 15703 - DNA, 19 bp, Gossypium hirsutum
atttttgaactgataaatt

SEQ ID NO: 15704 - DNA, 25 bp, Gossypium hirsutum
catcaaccaaacattgcagctctat

SEQ ID NO: 15705 - DNA, 22 bp, Gossypium hirsutum
tctagaggaccatcgggatacg

SEQ ID NO: 15706 - DNA, 18 bp, Gossypium hirsutum
ctatgaaaactgaattta

SEQ ID NO: 15707 - DNA, 18 bp, Gossypium hirsutum
ctatgaaaacagaattta

SEQ ID NO: 15708 - DNA, 17 bp, Gossypium hirsutum
cttgggcccggaagtga

SEQ ID NO: 15709 - DNA, 27 bp, Gossypium hirsutum
gcatttgccatgattttcttgttcttc

SEQ ID NO: 15710 - DNA, 20 bp, Gossypium hirsutum
catgtaatgagttacagctg

SEQ ID NO: 15711 - DNA, 19 bp, Gossypium hirsutum
atgtaatgagttgcagctg

SEQ ID NO: 15712 - DNA, 24 bp, Gossypium hirsutum
gacattgaaatggcagaggttagg

SEQ ID NO: 15713 - DNA, 23 bp, Gossypium hirsutum
cattctggaggtggacttgacaa

SEQ ID NO: 15714 - DNA, 16 bp, Gossypium hirsutum
tctgcagtgcccccta

SEQ ID NO: 15715 - DNA, 16 bp, Gossypium hirsutum
tctgcagtgaccccta

SEQ ID NO: 15716 - DNA, 34 bp, Gossypium hirsutum
cagcattgaagagaaaatacaacataagaaatca

SEQ ID NO: 15717 - DNA, 27 bp, Gossypium hirsutum
ccacttcatctctccgctaaacatatt

SEQ ID NO: 15718 - DNA, 17 bp, Gossypium hirsutum
cacaagcttaggaggct

SEQ ID NO: 15719 - DNA, 17 bp, Gossypium hirsutum
cacaagcttacgaggct

SEQ ID NO: 15720 - DNA, 22 bp, Gossypium hirsutum
gggtgagtttccgcaacaaatt

SEQ ID NO: 15721 - DNA, 44 bp, Gossypium hirsutum
cctagttaaatcaaatcaaaggtttagatcttagatataagtat

SEQ ID NO: 15722 - DNA, 21 bp, Gossypium hirsutum
ttgaaggtcatatgtagatac

SEQ ID NO: 15723 - DNA, 21 bp, Gossypium hirsutum
ttgaaggtcatatatagatac

SEQ ID NO: 15724 - DNA, 35 bp, Gossypium hirsutum
acggtcgttctatattagtacaataacaaagaaaa

SEQ ID NO: 15725 - DNA, 25 bp, Gossypium hirsutum
gatgcactcatgatgctgtcttcta

SEQ ID NO: 15726 - DNA, 15 bp, Gossypium hirsutum
catgaggcctcctcc

SEQ ID NO: 15727 - DNA, 15 bp, Gossypium hirsutum
catgagacctcctcc

SEQ ID NO: 15728 - DNA, 25 bp, Gossypium hirsutum
ctaacagtcgcaacaacaattccaa

SEQ ID NO: 15729 - DNA, 25 bp, Gossypium hirsutum
accccacatagggttaaatctcaga

SEQ ID NO: 15730 - DNA, 24 bp, Gossypium hirsutum
caaaagtttactacttatgattca

SEQ ID NO: 15731 - DNA, 21 bp, Gossypium hirsutum
aagtttactacttaagattca

SEQ ID NO: 15732 - DNA, 33 bp, Gossypium hirsutum
tgtaggactcatgaaactaaaattatctgcttt

SEQ ID NO: 15733 - DNA, 22 bp, Gossypium hirsutum
tgcgcaagaactgcaatgaaaa

SEQ ID NO: 15734 - DNA, 16 bp, Gossypium hirsutum
cagcattaccaaatac

SEQ ID NO: 15735 - DNA, 15 bp, Gossypium hirsutum
agcattacgaaatac

SEQ ID NO: 15736 - DNA, 43 bp, Gossypium hirsutum
tttctattttacttagaggaaaagaaccattttaagatttttt

SEQ ID NO: 15737 - DNA, 28 bp, Gossypium hirsutum
gtgggctgttaagctacttaatatggta

SEQ ID NO: 15738 - DNA, 17 bp, Gossypium hirsutum
catttgtcgataacatc

SEQ ID NO: 15739 - DNA, 17 bp, Gossypium hirsutum
catttgtggataacatc

SEQ ID NO: 15740 - DNA, 29 bp, Gossypium hirsutum
aggcaaaaatagacagataaaacgtcctt

SEQ ID NO: 15741 - DNA, 25 bp, Gossypium hirsutum
gtcatcataagctaggcctgagaat

SEQ ID NO: 15742 - DNA, 14 bp, Gossypium hirsutum
ctttggcagacttc

SEQ ID NO: 15743 - DNA, 14 bp, Gossypium hirsutum
ctttggccgacttc

SEQ ID NO: 15744 - DNA, 24 bp, Gossypium hirsutum
gcatgcacaacgaaacactcaaaa

SEQ ID NO: 15745 - DNA, 31 bp, Gossypium hirsutum
aatattggcttaaaaagatacccaataagcg

SEQ ID NO: 15746 - DNA, 14 bp, Gossypium hirsutum
cacctgaatttctc

SEQ ID NO: 15747 - DNA, 14 bp, Gossypium hirsutum
cacctgattttctc

SEQ ID NO: 15748 - DNA, 24 bp, Gossypium hirsutum
agttgcttatctctccaggtgact

SEQ ID NO: 15749 - DNA, 27 bp, Gossypium hirsutum
tccacttcactggttaacatacaactc

SEQ ID NO: 15750 - DNA, 18 bp, Gossypium hirsutum
tggaggttataagtcttt

SEQ ID NO: 15751 - DNA, 18 bp, Gossypium hirsutum
tggaggttatacgtcttt

SEQ ID NO: 15752 - DNA, 22 bp, Gossypium hirsutum
cggaatggcaaatacgttggtt

SEQ ID NO: 15753 - DNA, 32 bp, Gossypium hirsutum
aaatccatcagataaccattataaccaacagt

SEQ ID NO: 15754 - DNA, 15 bp, Gossypium hirsutum
tcagcaagcattgaa

SEQ ID NO: 15755 - DNA, 15 bp, Gossypium hirsutum
tcagcaaccattgaa

SEQ ID NO: 15756 - DNA, 24 bp, Gossypium hirsutum
tgattccagccattacccttacac

SEQ ID NO: 15757 - DNA, 23 bp, Gossypium hirsutum
ccctccaaatacgaaaccaacct

SEQ ID NO: 15758 - DNA, 22 bp, Gossypium hirsutum
cattgtgaagttttcccactac

SEQ ID NO: 15759 - DNA, 22 bp, Gossypium hirsutum
cattgtgaagtttttccactac

SEQ ID NO: 15760 - DNA, 23 bp, Gossypium hirsutum
tggttgttttcgaagggttggat

SEQ ID NO: 15761 - DNA, 25 bp, Gossypium hirsutum
tctcccccaatccaattctagctat

SEQ ID NO: 15762 - DNA, 21 bp, Gossypium hirsutum
tctttgtatcacaacacatag

SEQ ID NO: 15763 - DNA, 20 bp, Gossypium hirsutum
ctttgtatcacaccacatag

SEQ ID NO: 15764 - DNA, 25 bp, Gossypium hirsutum
agcttcaaaaatgcctggtaggaat

SEQ ID NO: 15765 - DNA, 24 bp, Gossypium hirsutum
ccacctttcaagtctgttcaaaca

SEQ ID NO: 15766 - DNA, 20 bp, Gossypium hirsutum
tctaccaagtatcggtcact

SEQ ID NO: 15767 - DNA, 20 bp, Gossypium hirsutum
tctaccaagtatcagtcact

SEQ ID NO: 15768 - DNA, 25 bp, Gossypium hirsutum
tcttgttgggtggttgatagagttc

SEQ ID NO: 15769 - DNA, 29 bp, Gossypium hirsutum
caagcatttcaatttgcctattttgtcaa

SEQ ID NO: 15770 - DNA, 17 bp, Gossypium hirsutum
aaccaccgtttgataat

SEQ ID NO: 15771 - DNA, 19 bp, Gossypium hirsutum
aaaaccaccttttgataat

SEQ ID NO: 15772 - DNA, 23 bp, Gossypium hirsutum
ctaacccaaaagctcgagcacta

SEQ ID NO: 15773 - DNA, 25 bp, Gossypium hirsutum
gcttgaaccccaaaccttatgttag

SEQ ID NO: 15774 - DNA, 17 bp, Gossypium hirsutum
tcaagtgctgtggataa

SEQ ID NO: 15775 - DNA, 16 bp, Gossypium hirsutum
caagtgctgtgaataa

SEQ ID NO: 15776 - DNA, 24 bp, Gossypium hirsutum
caatgctagttggatcgagtggta

SEQ ID NO: 15777 - DNA, 25 bp, Gossypium hirsutum
aagaacatcatgcacttgctaatgc

SEQ ID NO: 15778 - DNA, 19 bp, Gossypium hirsutum
attaatgctctgctagcgc

SEQ ID NO: 15779 - DNA, 15 bp, Gossypium hirsutum
atgctctgctggcgc

SEQ ID NO: 15780 - DNA, 23 bp, Gossypium hirsutum
ctcttgatgctgttcttgttgct

SEQ ID NO: 15781 - DNA, 26 bp, Gossypium hirsutum
tgctgagaaaagaaaagaacagctca

SEQ ID NO: 15782 - DNA, 14 bp, Gossypium hirsutum
ccatcgcccatctt

SEQ ID NO: 15783 - DNA, 13 bp, Gossypium hirsutum
catcgcacatctt

SEQ ID NO: 15784 - DNA, 24 bp, Gossypium hirsutum
cctcaggaagagctgctaggtatt

SEQ ID NO: 15785 - DNA, 23 bp, Gossypium hirsutum
actgagttacaggccttgattcg

SEQ ID NO: 15786 - DNA, 17 bp, Gossypium hirsutum
caacacctgagttgttt

SEQ ID NO: 15787 - DNA, 15 bp, Gossypium hirsutum
acacctgggttgttt

SEQ ID NO: 15788 - DNA, 21 bp, Gossypium hirsutum
ccaactgcttggcgattctct

SEQ ID NO: 15789 - DNA, 28 bp, Gossypium hirsutum
gagagtagaagatgctcttaatgcaact

SEQ ID NO: 15790 - DNA, 19 bp, Gossypium hirsutum
aagacaagctttaagattt

SEQ ID NO: 15791 - DNA, 16 bp, Gossypium hirsutum
acaagcttcaagattt

SEQ ID NO: 15792 - DNA, 24 bp, Gossypium hirsutum
ttcctcaactgctgcctgataaat

SEQ ID NO: 15793 - DNA, 25 bp, Gossypium hirsutum
gttcaaaaaccaagcatgggattca

SEQ ID NO: 15794 - DNA, 18 bp, Gossypium hirsutum
ctttgttgttccaattat

SEQ ID NO: 15795 - DNA, 17 bp, Gossypium hirsutum
tttgttgttcaaattat

SEQ ID NO: 15796 - DNA, 19 bp, Gossypium hirsutum
ctatatgcgcgtgggccta

SEQ ID NO: 15797 - DNA, 30 bp, Gossypium hirsutum
cagttctatatgcatgtttaggttctgaca

SEQ ID NO: 15798 - DNA, 21 bp, Gossypium hirsutum
catgtagctttacctatgctg

SEQ ID NO: 15799 - DNA, 20 bp, Gossypium hirsutum
atgtagctttacctgtgctg

SEQ ID NO: 15800 - DNA, 26 bp, Gossypium hirsutum
ccaaccattggaaagcataaaactca

SEQ ID NO: 15801 - DNA, 25 bp, Gossypium hirsutum
ttgtgtggacctttgtagtctcatg

SEQ ID NO: 15802 - DNA, 17 bp, Gossypium hirsutum
ttttggtacgcacaaaa

SEQ ID NO: 15803 - DNA, 17 bp, Gossypium hirsutum
ttttggtacgcacgaaa

SEQ ID NO: 15804 - DNA, 25 bp, Gossypium hirsutum
agcagaaacatctgaatcccaagat

SEQ ID NO: 15805 - DNA, 28 bp, Gossypium hirsutum
gtaggaatatgaacacgtagattgaggg

SEQ ID NO: 15806 - DNA, 17 bp, Gossypium hirsutum
ttgacgagttgatttga

SEQ ID NO: 15807 - DNA, 17 bp, Gossypium hirsutum
ttgacgagttggtttga

SEQ ID NO: 15808 - DNA, 33 bp, Gossypium hirsutum
tgtggaaattaaaattctggaaacatcaatctt

SEQ ID NO: 15809 - DNA, 26 bp, Gossypium hirsutum
tgggtttccaacttcaatttgaagga

SEQ ID NO: 15810 - DNA, 14 bp, Gossypium hirsutum
acgttggtggcatc

SEQ ID NO: 15811 - DNA, 16 bp, Gossypium hirsutum
acacgttagtggcatc

SEQ ID NO: 15812 - DNA, 26 bp, Gossypium hirsutum
gatacttgtgcacagttaccctatga

SEQ ID NO: 15813 - DNA, 32 bp, Gossypium hirsutum
atcatttttctttgaaattgcagtttttgctt

SEQ ID NO: 15814 - DNA, 19 bp, Gossypium hirsutum
catgtcccttttagtgcct

SEQ ID NO: 15815 - DNA, 18 bp, Gossypium hirsutum
catgtcccttttgtgcct

SEQ ID NO: 15816 - DNA, 28 bp, Gossypium hirsutum
tccatttccaaagtagcatgaatcttga

SEQ ID NO: 15817 - DNA, 28 bp, Gossypium hirsutum
tggcagaacttttaagcacttgaatttg

SEQ ID NO: 15818 - DNA, 17 bp, Gossypium hirsutum
catggaacttgaaagtg

SEQ ID NO: 15819 - DNA, 16 bp, Gossypium hirsutum
atggaacttaaaagtg

SEQ ID NO: 15820 - DNA, 27 bp, Gossypium hirsutum
atgggaaaaaatggtgtccaaaaactt

SEQ ID NO: 15821 - DNA, 25 bp, Gossypium hirsutum
ggagacaagggtctgtatcggaata

SEQ ID NO: 15822 - DNA, 17 bp, Gossypium hirsutum
atttccagcagtatgag

SEQ ID NO: 15823 - DNA, 17 bp, Gossypium hirsutum
atttccagcactatgag

SEQ ID NO: 15824 - DNA, 21 bp, Gossypium hirsutum
acccagtcacaaggctttctc

SEQ ID NO: 15825 - DNA, 21 bp, Gossypium hirsutum
gctctgggtgttcgtattcga

SEQ ID NO: 15826 - DNA, 19 bp, Gossypium hirsutum
cattccgtacatgagaaga

SEQ ID NO: 15827 - DNA, 18 bp, Gossypium hirsutum
attccgtacataagaaga

SEQ ID NO: 15828 - DNA, 25 bp, Gossypium hirsutum
gtttcctacaactccccaggtaaaa

SEQ ID NO: 15829 - DNA, 25 bp, Gossypium hirsutum
ggaagattaccaaactggagggaaa

SEQ ID NO: 15830 - DNA, 16 bp, Gossypium hirsutum
caattctgcaagctct

SEQ ID NO: 15831 - DNA, 16 bp, Gossypium hirsutum
caattctgaaagctct

SEQ ID NO: 15832 - DNA, 23 bp, Gossypium hirsutum
gcgaaccatgacatcacgaaaag

SEQ ID NO: 15833 - DNA, 21 bp, Gossypium hirsutum
ccgtcactactcagacaagca

SEQ ID NO: 15834 - DNA, 22 bp, Gossypium hirsutum
ctctaaatatagacttgaaatt

SEQ ID NO: 15835 - DNA, 22 bp, Gossypium hirsutum
ctctaaatatagacatgaaatt

SEQ ID NO: 15836 - DNA, 25 bp, Gossypium hirsutum
agggtcaaataccattggcttttct

SEQ ID NO: 15837 - DNA, 25 bp, Gossypium hirsutum
cacctcctttccttgctgtctttat

SEQ ID NO: 15838 - DNA, 17 bp, Gossypium hirsutum
tctcctcctccttttag

SEQ ID NO: 15839 - DNA, 17 bp, Gossypium hirsutum
tctcctccttcttttag

SEQ ID NO: 15840 - DNA, 27 bp, Gossypium hirsutum
gtcttcttctctttcttacctcacaca

SEQ ID NO: 15841 - DNA, 25 bp, Gossypium hirsutum
gcctgcttttggaattggataacag

SEQ ID NO: 15842 - DNA, 17 bp, Gossypium hirsutum
aacttcaaacgaattca

SEQ ID NO: 15843 - DNA, 15 bp, Gossypium hirsutum
cttcaaacaaattca

SEQ ID NO: 15844 - DNA, 25 bp, Gossypium hirsutum
accttggttcagatctggttcattt

SEQ ID NO: 15845 - DNA, 34 bp, Gossypium hirsutum
tgcattaacactattagtttatattaacgtggca

SEQ ID NO: 15846 - DNA, 23 bp, Gossypium hirsutum
aatttattggtgacatatgatag

SEQ ID NO: 15847 - DNA, 20 bp, Gossypium hirsutum
ttattggtgacatgtgatag

SEQ ID NO: 15848 - DNA, 24 bp, Gossypium hirsutum
atcgccacatgacatattgagagg

SEQ ID NO: 15849 - DNA, 19 bp, Gossypium hirsutum
ggttgctctttaggccggt

SEQ ID NO: 15850 - DNA, 19 bp, Gossypium hirsutum
ttcagacctcaacagtgga

SEQ ID NO: 15851 - DNA, 17 bp, Gossypium hirsutum
cagacctcaacggtgga

SEQ ID NO: 15852 - DNA, 24 bp, Gossypium hirsutum
cgcttcggactacaagagacaaaa

SEQ ID NO: 15853 - DNA, 24 bp, Gossypium hirsutum
gccgttcaccttatcaacaggtta

SEQ ID NO: 15854 - DNA, 18 bp, Gossypium hirsutum
tctctcatacggtgtttg

SEQ ID NO: 15855 - DNA, 18 bp, Gossypium hirsutum
tctctcatacagtgtttg

SEQ ID NO: 15856 - DNA, 30 bp, Gossypium hirsutum
ctcccaaataccttgaactgagaataatca

SEQ ID NO: 15857 - DNA, 32 bp, Gossypium hirsutum
gcactgcttaagtattgtaactattttgttca

SEQ ID NO: 15858 - DNA, 18 bp, Gossypium hirsutum
cttgattgcataatgcag

SEQ ID NO: 15859 - DNA, 18 bp, Gossypium hirsutum
cttgattgcatgatgcag

SEQ ID NO: 15860 - DNA, 37 bp, Gossypium hirsutum
tgcaaggaagttagaataaatataacagatctgattc

SEQ ID NO: 15861 - DNA, 26 bp, Gossypium hirsutum
gttgaagttcaatttggcagtaaggt

SEQ ID NO: 15862 - DNA, 21 bp, Gossypium hirsutum
cttcaaactaactagagagtg

SEQ ID NO: 15863 - DNA, 20 bp, Gossypium hirsutum
ttcaaactaactggagagtg

SEQ ID NO: 15864 - DNA, 23 bp, Gossypium hirsutum
aacttgagtaaagggccgaaact

SEQ ID NO: 15865 - DNA, 25 bp, Gossypium hirsutum
gaactctccgacaaagcaaatatgg

SEQ ID NO: 15866 - DNA, 16 bp, Gossypium hirsutum
catcgtcaacggagtt

SEQ ID NO: 15867 - DNA, 16 bp, Gossypium hirsutum
catcgtccacggagtt

SEQ ID NO: 15868 - DNA, 26 bp, Gossypium hirsutum
gccaacctttgtttgaattgaatcct

SEQ ID NO: 15869 - DNA, 32 bp, Gossypium hirsutum
cccaataaaaagtttaagcaagaatccatacc

SEQ ID NO: 15870 - DNA, 18 bp, Gossypium hirsutum
tgatgatgtcaactccag

SEQ ID NO: 15871 - DNA, 16 bp, Gossypium hirsutum
atgatgtcagctccag

SEQ ID NO: 15872 - DNA, 26 bp, Gossypium hirsutum
ggctatcaaaatccacatgagcagta

SEQ ID NO: 15873 - DNA, 18 bp, Gossypium hirsutum
cgggcatcaggcacatca

SEQ ID NO: 15874 - DNA, 20 bp, Gossypium hirsutum
aagggtagaagaatcattta

SEQ ID NO: 15875 - DNA, 20 bp, Gossypium hirsutum
aagggtagaagaatcactta

SEQ ID NO: 15876 - DNA, 25 bp, Gossypium hirsutum
tgaaccagatgacaaagggtttctc

SEQ ID NO: 15877 - DNA, 30 bp, Gossypium hirsutum
gtttttggtgcctgctttatctttatgtta

SEQ ID NO: 15878 - DNA, 18 bp, Gossypium hirsutum
tgaacatgtaggatctca

SEQ ID NO: 15879 - DNA, 16 bp, Gossypium hirsutum
aacatgtagaatctca

SEQ ID NO: 15880 - DNA, 24 bp, Gossypium hirsutum
cgaccaccaatctggttttgaaaa

SEQ ID NO: 15881 - DNA, 26 bp, Gossypium hirsutum
agggctttttgcattttatcaaagct

SEQ ID NO: 15882 - DNA, 19 bp, Gossypium hirsutum
caatcgattgcttgtaaaa

SEQ ID NO: 15883 - DNA, 17 bp, Gossypium hirsutum
atcgattgcttggaaaa

SEQ ID NO: 15884 - DNA, 42 bp, Gossypium hirsutum
cagttcagtttaagttctttttatatgataaggatcaaaata

SEQ ID NO: 15885 - DNA, 21 bp, Gossypium hirsutum
ttccaacctcgacatcgcaat

SEQ ID NO: 15886 - DNA, 18 bp, Gossypium hirsutum
ctcgatacactgagctat

SEQ ID NO: 15887 - DNA, 18 bp, Gossypium hirsutum
ctcgatacactcagctat

SEQ ID NO: 15888 - DNA, 25 bp, Gossypium hirsutum
gccccttttcttcaaagcttttcat

SEQ ID NO: 15889 - DNA, 25 bp, Gossypium hirsutum
catcctccgatacctgatagcctat

SEQ ID NO: 15890 - DNA, 18 bp, Gossypium hirsutum
attttctgcaccagtgct

SEQ ID NO: 15891 - DNA, 13 bp, Gossypium hirsutum
ctgcgccagtgct

SEQ ID NO: 15892 - DNA, 27 bp, Gossypium hirsutum
cttcatttatctgccaccttaccttct

SEQ ID NO: 15893 - DNA, 24 bp, Gossypium hirsutum
ggaacggcaagatgtaccaactta

SEQ ID NO: 15894 - DNA, 19 bp, Gossypium hirsutum
acatgaacacttgtacgtc

SEQ ID NO: 15895 - DNA, 19 bp, Gossypium hirsutum
acatgaacaattgtacgtc

SEQ ID NO: 15896 - DNA, 25 bp, Gossypium hirsutum
ccacttttcttaccatcgccttcat

SEQ ID NO: 15897 - DNA, 32 bp, Gossypium hirsutum
ggcacatgaaattatatgaaactaatcccaat

SEQ ID NO: 15898 - DNA, 22 bp, Gossypium hirsutum
attcattgaaagagagtgcaaa

SEQ ID NO: 15899 - DNA, 18 bp, Gossypium hirsutum
attgaaagagggtgcaaa

SEQ ID NO: 15900 - DNA, 23 bp, Gossypium hirsutum
gcaatgggctttgatcagatcca

SEQ ID NO: 15901 - DNA, 24 bp, Gossypium hirsutum
ggtttgccttcaacagtaccatac

SEQ ID NO: 15902 - DNA, 16 bp, Gossypium hirsutum
ccgacctacacttgaa

SEQ ID NO: 15903 - DNA, 17 bp, Gossypium hirsutum
accgacctactcttgaa

SEQ ID NO: 15904 - DNA, 22 bp, Gossypium hirsutum
accgtgtcaagctgtcttatcg

SEQ ID NO: 15905 - DNA, 23 bp, Gossypium hirsutum
gctggagctacatgcttaatcct

SEQ ID NO: 15906 - DNA, 18 bp, Gossypium hirsutum
tgtgatgtgttggtggtt

SEQ ID NO: 15907 - DNA, 19 bp, Gossypium hirsutum
ttgtgatgtgttagtggtt

SEQ ID NO: 15908 - DNA, 26 bp, Gossypium hirsutum
cccattttctaacctttgacatggtt

SEQ ID NO: 15909 - DNA, 25 bp, Gossypium hirsutum
gggactggtattagatggccataat

SEQ ID NO: 15910 - DNA, 19 bp, Gossypium hirsutum
tcaatcaatatcaagatcc

SEQ ID NO: 15911 - DNA, 20 bp, Gossypium hirsutum
ttcaatcaatattaagatcc

SEQ ID NO: 15912 - DNA, 31 bp, Gossypium hirsutum
tgtcaaggtgagtctacttgatatttactga

SEQ ID NO: 15913 - DNA, 25 bp, Gossypium hirsutum
gccgggctcaaaaatctttttcaaa

SEQ ID NO: 15914 - DNA, 15 bp, Gossypium hirsutum
aatagcatcaaattc

SEQ ID NO: 15915 - DNA, 16 bp, Gossypium hirsutum
caatagcatcgaattc

SEQ ID NO: 15916 - DNA, 27 bp, Gossypium hirsutum
ctggaaagttaccaaaagctgtagatg

SEQ ID NO: 15917 - DNA, 36 bp, Gossypium hirsutum
gaaaagaggtaagagtgattagatattgacaaacta

SEQ ID NO: 15918 - DNA, 16 bp, Gossypium hirsutum
ttacccagaagcatgc

SEQ ID NO: 15919 - DNA, 14 bp, Gossypium hirsutum
acccagacgcatgc

SEQ ID NO: 15920 - DNA, 22 bp, Gossypium hirsutum
catactcatacccgacgctcat

SEQ ID NO: 15921 - DNA, 27 bp, Gossypium hirsutum
ctggttatttgcttcttttggacatga

SEQ ID NO: 15922 - DNA, 18 bp, Gossypium hirsutum
cataaccattcaagtttt

SEQ ID NO: 15923 - DNA, 18 bp, Gossypium hirsutum
cataaccattcgagtttt

SEQ ID NO: 15924 - DNA, 31 bp, Gossypium hirsutum
actttgagcctctgcataataacttgtaaaa

SEQ ID NO: 15925 - DNA, 33 bp, Gossypium hirsutum
tgtgggaaacaactatgttacctttttatctag

SEQ ID NO: 15926 - DNA, 14 bp, Gossypium hirsutum
cccacccatgaatg

SEQ ID NO: 15927 - DNA, 14 bp, Gossypium hirsutum
cccacccgtgaatg

SEQ ID NO: 15928 - DNA, 24 bp, Gossypium hirsutum
cagcaagaagatgggtctgttagt

SEQ ID NO: 15929 - DNA, 31 bp, Gossypium hirsutum
acaggaattttgatttgaactttaatggcaa

SEQ ID NO: 15930 - DNA, 16 bp, Gossypium hirsutum
ctagagcccacctatc

SEQ ID NO: 15931 - DNA, 18 bp, Gossypium hirsutum
ctctagagccctcctatc

SEQ ID NO: 15932 - DNA, 23 bp, Gossypium hirsutum
cacaagaaggcaaagacagcaaa

SEQ ID NO: 15933 - DNA, 26 bp, Gossypium hirsutum
tcaacaagtcttgagtggatgaacaa

SEQ ID NO: 15934 - DNA, 18 bp, Gossypium hirsutum
aacatcagggttgtttag

SEQ ID NO: 15935 - DNA, 17 bp, Gossypium hirsutum
acatcagggtagtttag

SEQ ID NO: 15936 - DNA, 23 bp, Gossypium hirsutum
gctgttgagttgcagagtacatg

SEQ ID NO: 15937 - DNA, 36 bp, Gossypium hirsutum
catagagaaaaataatagggatacatgaatgtctca

SEQ ID NO: 15938 - DNA, 16 bp, Gossypium hirsutum
ctagcgtatcaaaatt

SEQ ID NO: 15939 - DNA, 16 bp, Gossypium hirsutum
ctagcgtattaaaatt

SEQ ID NO: 15940 - DNA, 33 bp, Gossypium hirsutum
tgttcaagtgttttgtggtattataattgtgtt

SEQ ID NO: 15941 - DNA, 24 bp, Gossypium hirsutum
atttgcacttgtaggtccttttgc

SEQ ID NO: 15942 - DNA, 22 bp, Gossypium hirsutum
caataataatcttctgaatcat

SEQ ID NO: 15943 - DNA, 22 bp, Gossypium hirsutum
caataataatcttctaaatcat

SEQ ID NO: 15944 - DNA, 34 bp, Gossypium hirsutum
attctgcacaataataaacatgaatttctggatt

SEQ ID NO: 15945 - DNA, 24 bp, Gossypium hirsutum
gccattgctgattgttgtttcaca

SEQ ID NO: 15946 - DNA, 19 bp, Gossypium hirsutum
ctgattcttcagtgcagtc

SEQ ID NO: 15947 - DNA, 19 bp, Gossypium hirsutum
ctgattcttcaatgcagtc

SEQ ID NO: 15948 - DNA, 19 bp, Gossypium hirsutum
gccagtgccagcctatctc

SEQ ID NO: 15949 - DNA, 25 bp, Gossypium hirsutum
cctcaggtgatttcccaaaactcaa

SEQ ID NO: 15950 - DNA, 23 bp, Gossypium hirsutum
ttataactgtaagtaacaatatt

SEQ ID NO: 15951 - DNA, 17 bp, Gossypium hirsutum
ctgtaagtaacaatttt

SEQ ID NO: 15952 - DNA, 25 bp, Gossypium hirsutum
ggtcaatcttgccgaattctgttta

SEQ ID NO: 15953 - DNA, 27 bp, Gossypium hirsutum
agacaaaagatgccactaggaagaatc

SEQ ID NO: 15954 - DNA, 18 bp, Gossypium hirsutum
ctatgttcatccaaaagt

SEQ ID NO: 15955 - DNA, 18 bp, Gossypium hirsutum
ctatgttcattcaaaagt

SEQ ID NO: 15956 - DNA, 21 bp, Gossypium hirsutum
ccacctcaaaaccctgcaaaa

SEQ ID NO: 15957 - DNA, 22 bp, Gossypium hirsutum
gaagtgggaaatcgacggtgat

SEQ ID NO: 15958 - DNA, 19 bp, Gossypium hirsutum
cttgatagaaaggttttac

SEQ ID NO: 15959 - DNA, 19 bp, Gossypium hirsutum
cttgatagaaatgttttac

SEQ ID NO: 15960 - DNA, 22 bp, Gossypium hirsutum
agtacctccccagtcattggat

SEQ ID NO: 15961 - DNA, 22 bp, Gossypium hirsutum
ctgagcctcgggtaagactttt

SEQ ID NO: 15962 - DNA, 13 bp, Gossypium hirsutum
cgggtcgaccccg

SEQ ID NO: 15963 - DNA, 13 bp, Gossypium hirsutum
cgggtcgagcccg

SEQ ID NO: 15964 - DNA, 24 bp, Gossypium hirsutum
acccgggcccatatttgattaaaa

SEQ ID NO: 15965 - DNA, 25 bp, Gossypium hirsutum
ctcatctgctttcgttttccttagc

SEQ ID NO: 15966 - DNA, 16 bp, Gossypium hirsutum
accatgactaaaagac

SEQ ID NO: 15967 - DNA, 14 bp, Gossypium hirsutum
catgacgaaaagac

SEQ ID NO: 15968 - DNA, 20 bp, Gossypium hirsutum
caagccgtgctgtgattgag

SEQ ID NO: 15969 - DNA, 46 bp, Gossypium hirsutum
gtaaaaactaaaatatcagtataaaagattgcattagctcaatata

SEQ ID NO: 15970 - DNA, 22 bp, Gossypium hirsutum
ttcaattcgttaaatacctttt

SEQ ID NO: 15971 - DNA, 19 bp, Gossypium hirsutum
aattcgttaaatgcctttt

SEQ ID NO: 15972 - DNA, 39 bp, Gossypium hirsutum
tctttgattatgaatattgcacaattgattttatctcaa

SEQ ID NO: 15973 - DNA, 25 bp, Gossypium hirsutum
acctgaaagccatgacagtcaattt

SEQ ID NO: 15974 - DNA, 16 bp, Gossypium hirsutum
tatgagcacagcattt

SEQ ID NO: 15975 - DNA, 16 bp, Gossypium hirsutum
tatgagcacaccattt

SEQ ID NO: 15976 - DNA, 25 bp, Gossypium hirsutum
aattgaactggtcagtagtctgcat

SEQ ID NO: 15977 - DNA, 27 bp, Gossypium hirsutum
actccaagatgtacttcctctgattca

SEQ ID NO: 15978 - DNA, 21 bp, Gossypium hirsutum
ttatgtgttacttcgatccca

SEQ ID NO: 15979 - DNA, 18 bp, Gossypium hirsutum
tgtgtttcttcgatccca

SEQ ID NO: 15980 - DNA, 27 bp, Gossypium hirsutum
cttttaaggacttaggccagttgaact

SEQ ID NO: 15981 - DNA, 22 bp, Gossypium hirsutum
ggaggaaagttccatgcttgtg

SEQ ID NO: 15982 - DNA, 16 bp, Gossypium hirsutum
accaagtgatttgctg

SEQ ID NO: 15983 - DNA, 15 bp, Gossypium hirsutum
ccaagtggtttgctg

SEQ ID NO: 15984 - DNA, 24 bp, Gossypium hirsutum
ggtacttggcttgagaatgaaacc

SEQ ID NO: 15985 - DNA, 26 bp, Gossypium hirsutum
atcaaccagttacgtcagttaaagct

SEQ ID NO: 15986 - DNA, 22 bp, Gossypium hirsutum
ccctcctttcaattttagtaag

SEQ ID NO: 15987 - DNA, 21 bp, Gossypium hirsutum
cctcctttcaatttttgtaag

SEQ ID NO: 15988 - DNA, 29 bp, Gossypium hirsutum
tcttaggactttgttgtattgctgatcaa

SEQ ID NO: 15989 - DNA, 27 bp, Gossypium hirsutum
gttaaggccatgatgcaaaaccaatat

SEQ ID NO: 15990 - DNA, 18 bp, Gossypium hirsutum
aactcgacttcgagctag

SEQ ID NO: 15991 - DNA, 16 bp, Gossypium hirsutum
ctcgacttcaagctag

SEQ ID NO: 15992 - DNA, 34 bp, Gossypium hirsutum
caaaacagacaaatttagtatcattgttcactgt

SEQ ID NO: 15993 - DNA, 30 bp, Gossypium hirsutum
ttcttttgatgttttgtctttgatggatgt

SEQ ID NO: 15994 - DNA, 18 bp, Gossypium hirsutum
atcaactgaatcattttt

SEQ ID NO: 15995 - DNA, 15 bp, Gossypium hirsutum
aactgaaccattttt

SEQ ID NO: 15996 - DNA, 24 bp, Gossypium hirsutum
cgataaactagcagagcagtcgta

SEQ ID NO: 15997 - DNA, 27 bp, Gossypium hirsutum
cgtagaacatctttgatcaatgcaagt

SEQ ID NO: 15998 - DNA, 22 bp, Gossypium hirsutum
tcattgttgattaattatatcc

SEQ ID NO: 15999 - DNA, 21 bp, Gossypium hirsutum
cattgttgattaattctatcc

SEQ ID NO: 16000 - DNA, 29 bp, Gossypium hirsutum
gcctgtactacttcactttattcttgagt

SEQ ID NO: 16001 - DNA, 25 bp, Gossypium hirsutum
tgggattgctgaggattagttttgg

SEQ ID NO: 16002 - DNA, 17 bp, Gossypium hirsutum
ccctacaatccaaggaa

SEQ ID NO: 16003 - DNA, 17 bp, Gossypium hirsutum
ccctacaatcaaaggaa

SEQ ID NO: 16004 - DNA, 24 bp, Gossypium hirsutum
ggaagaagagttaagggtgtgctt

SEQ ID NO: 16005 - DNA, 25 bp, Gossypium hirsutum
cggaaaaacgaggcaagaaacaatt

SEQ ID NO: 16006 - DNA, 15 bp, Gossypium hirsutum
tttgacccacaattc

SEQ ID NO: 16007 - DNA, 16 bp, Gossypium hirsutum
atttgacccccaattc

SEQ ID NO: 16008 - DNA, 26 bp, Gossypium hirsutum
acaaacatgcactaccatctgatctc

SEQ ID NO: 16009 - DNA, 22 bp, Gossypium hirsutum
gcaagcatgaagtctgcaacag

SEQ ID NO: 16010 - DNA, 15 bp, Gossypium hirsutum
cttgctgctgctaac

SEQ ID NO: 16011 - DNA, 14 bp, Gossypium hirsutum
ttgctgcagctaac

SEQ ID NO: 16012 - DNA, 25 bp, Gossypium hirsutum
acaagtccatcagcttttagcttct

SEQ ID NO: 16013 - DNA, 26 bp, Gossypium hirsutum
tctgcaaaactcttcgagacatacaa

SEQ ID NO: 16014 - DNA, 16 bp, Gossypium hirsutum
aagcaagtgaaacaca

SEQ ID NO: 16015 - DNA, 19 bp, Gossypium hirsutum
ttaaagcaagtaaaacaca

SEQ ID NO: 16016 - DNA, 24 bp, Gossypium hirsutum
gcaggagcaagtcctttgtttttt

SEQ ID NO: 16017 - DNA, 25 bp, Gossypium hirsutum
gtccgcaaaaaagccaatttcaaaa

SEQ ID NO: 16018 - DNA, 18 bp, Gossypium hirsutum
aattgaattcgaattttt

SEQ ID NO: 16019 - DNA, 16 bp, Gossypium hirsutum
ttgaattcgaaatttt

SEQ ID NO: 16020 - DNA, 29 bp, Gossypium hirsutum
ggatttggatattcgaatccactggttat

SEQ ID NO: 16021 - DNA, 31 bp, Gossypium hirsutum
aatgccacattgtactattaacacaaaacat

SEQ ID NO: 16022 - DNA, 15 bp, Gossypium hirsutum
ctcctttgacatctc

SEQ ID NO: 16023 - DNA, 16 bp, Gossypium hirsutum
cctcctttaacatctc

SEQ ID NO: 16024 - DNA, 28 bp, Gossypium hirsutum
agttcttacattaggactaggtgagtgt

SEQ ID NO: 16025 - DNA, 25 bp, Gossypium hirsutum
tgtgaccttaagacagcctaaaacc

SEQ ID NO: 16026 - DNA, 15 bp, Gossypium hirsutum
tcctacacaaaactc

SEQ ID NO: 16027 - DNA, 17 bp, Gossypium hirsutum
aatcctacataaaactc

SEQ ID NO: 16028 - DNA, 25 bp, Gossypium hirsutum
gcaaaaatctacacgtgttgaagct

SEQ ID NO: 16029 - DNA, 28 bp, Gossypium hirsutum
gggttgtgtgtacatgtatcgttatttg

SEQ ID NO: 16030 - DNA, 17 bp, Gossypium hirsutum
acttacacttgattccg

SEQ ID NO: 16031 - DNA, 18 bp, Gossypium hirsutum
cacttacactttattccg

SEQ ID NO: 16032 - DNA, 25 bp, Gossypium hirsutum
cggctacaccagtaatgacaaaatg

SEQ ID NO: 16033 - DNA, 25 bp, Gossypium hirsutum
acaaaggattacaacgcacggatat

SEQ ID NO: 16034 - DNA, 21 bp, Gossypium hirsutum
tccataagaaagttataaatt

SEQ ID NO: 16035 - DNA, 19 bp, Gossypium hirsutum
cataagagagttataaatt

SEQ ID NO: 16036 - DNA, 22 bp, Gossypium hirsutum
ctgcttggcaaaagaagtgcat

SEQ ID NO: 16037 - DNA, 25 bp, Gossypium hirsutum
ccctatcaaatcaacgccaatacga

SEQ ID NO: 16038 - DNA, 14 bp, Gossypium hirsutum
cccaccattatttc

SEQ ID NO: 16039 - DNA, 14 bp, Gossypium hirsutum
tcccacattatttc

SEQ ID NO: 16040 - DNA, 22 bp, Gossypium hirsutum
gcaaatcggaagagggaaagga

SEQ ID NO: 16041 - DNA, 29 bp, Gossypium hirsutum
acttgttgttatgtgattgattcgtctct

SEQ ID NO: 16042 - DNA, 19 bp, Gossypium hirsutum
cgacaagttaagtataaac

SEQ ID NO: 16043 - DNA, 17 bp, Gossypium hirsutum
acaagttaagcataaac

SEQ ID NO: 16044 - DNA, 32 bp, Gossypium hirsutum
gatgtatggtgttaatatgcataacaaaacga

SEQ ID NO: 16045 - DNA, 31 bp, Gossypium hirsutum
gcataatgaaaaataagacacgtaagctgtt

SEQ ID NO: 16046 - DNA, 18 bp, Gossypium hirsutum
aacaatacatgaaaactt

SEQ ID NO: 16047 - DNA, 17 bp, Gossypium hirsutum
acaatacatcaaaactt

SEQ ID NO: 16048 - DNA, 24 bp, Gossypium hirsutum
gcttgagtagctcgagtttgtcta

SEQ ID NO: 16049 - DNA, 25 bp, Gossypium hirsutum
ttccatgctgaaagctgtctatgtt

SEQ ID NO: 16050 - DNA, 18 bp, Gossypium hirsutum
ttattgcacacggtgtct

SEQ ID NO: 16051 - DNA, 19 bp, Gossypium hirsutum
tttattgcacatggtgtct

SEQ ID NO: 16052 - DNA, 22 bp, Gossypium hirsutum
cccggtcattgagcataggtat

SEQ ID NO: 16053 - DNA, 24 bp, Gossypium hirsutum
gctacggttaaagaatgccttgtg

SEQ ID NO: 16054 - DNA, 16 bp, Gossypium hirsutum
atccatcgtcattgct

SEQ ID NO: 16055 - DNA, 13 bp, Gossypium hirsutum
catcgccattgct

SEQ ID NO: 16056 - DNA, 24 bp, Gossypium hirsutum
cgctgcttattttctgggacaaga

SEQ ID NO: 16057 - DNA, 25 bp, Gossypium hirsutum
caatgcctggaactgaacaaatgtt

SEQ ID NO: 16058 - DNA, 20 bp, Gossypium hirsutum
atgtctttctcctgcaccaa

SEQ ID NO: 16059 - DNA, 17 bp, Gossypium hirsutum
tctttctccggcaccaa

SEQ ID NO: 16060 - DNA, 22 bp, Gossypium hirsutum
aggcgccaaatctcctacaaaa

SEQ ID NO: 16061 - DNA, 27 bp, Gossypium hirsutum
cactaaacagagagaaaagggagaaca

SEQ ID NO: 16062 - DNA, 18 bp, Gossypium hirsutum
aaggatggcttcagacgt

SEQ ID NO: 16063 - DNA, 19 bp, Gossypium hirsutum
aaaggatggcttctgacgt

SEQ ID NO: 16064 - DNA, 19 bp, Gossypium hirsutum
ttcaaccccgcaacaagga

SEQ ID NO: 16065 - DNA, 27 bp, Gossypium hirsutum
acgcccactttattagatctgatcatg

SEQ ID NO: 16066 - DNA, 19 bp, Gossypium hirsutum
tttcaggtttggccaagta

SEQ ID NO: 16067 - DNA, 17 bp, Gossypium hirsutum
tcaggtttggacaagta

SEQ ID NO: 16068 - DNA, 37 bp, Gossypium hirsutum
cctatatttttgtctaaaccctcactttttaattgaa

SEQ ID NO: 16069 - DNA, 30 bp, Gossypium hirsutum
cttaacaataggaatcttcagttcctccat

SEQ ID NO: 16070 - DNA, 19 bp, Gossypium hirsutum
aacagactgctaattagaa

SEQ ID NO: 16071 - DNA, 19 bp, Gossypium hirsutum
aacagactgctacttagaa

SEQ ID NO: 16072 - DNA, 34 bp, Gossypium hirsutum
cctatttactaatgatcctctagtgttttccttt

SEQ ID NO: 16073 - DNA, 24 bp, Gossypium hirsutum
ctagcacagctgaagtagtcacaa

SEQ ID NO: 16074 - DNA, 15 bp, Gossypium hirsutum
tatcgttggaaacgc

SEQ ID NO: 16075 - DNA, 16 bp, Gossypium hirsutum
ctatcattggaaacgc

SEQ ID NO: 16076 - DNA, 29 bp, Gossypium hirsutum
tgacaaccttttcactgataacttcttga

SEQ ID NO: 16077 - DNA, 26 bp, Gossypium hirsutum
gtcaaatactacgactgagtggaact

SEQ ID NO: 16078 - DNA, 23 bp, Gossypium hirsutum
cttccatatttacttgtatgctg

SEQ ID NO: 16079 - DNA, 19 bp, Gossypium hirsutum
catatttacttgaatgctg

SEQ ID NO: 16080 - DNA, 39 bp, Gossypium hirsutum
tttcattactctagaagttacataagcaatatttaccat

SEQ ID NO: 16081 - DNA, 25 bp, Gossypium hirsutum
agagtgaagaggactgtgtagttga

SEQ ID NO: 16082 - DNA, 16 bp, Gossypium hirsutum
ttttccttcgattttc

SEQ ID NO: 16083 - DNA, 18 bp, Gossypium hirsutum
aattttccttagattttc

SEQ ID NO: 16084 - DNA, 23 bp, Gossypium hirsutum
tgccttttccattccttcactca

SEQ ID NO: 16085 - DNA, 23 bp, Gossypium hirsutum
ggtgggtagtgcttcttgtacac

SEQ ID NO: 16086 - DNA, 23 bp, Gossypium hirsutum
aaataaagtttgtgttaatcgaa

SEQ ID NO: 16087 - DNA, 23 bp, Gossypium hirsutum
aaataaagtttgtgttactcgaa

SEQ ID NO: 16088 - DNA, 31 bp, Gossypium hirsutum
gtttgaatactctgttttcaacttcaatcct

SEQ ID NO: 16089 - DNA, 25 bp, Gossypium hirsutum
ccttgatttgattggctctttgtga

SEQ ID NO: 16090 - DNA, 17 bp, Gossypium hirsutum
ccactttagcggcacag

SEQ ID NO: 16091 - DNA, 18 bp, Gossypium hirsutum
tccactttagaggcacag

SEQ ID NO: 16092 - DNA, 22 bp, Gossypium hirsutum
tgagctgactgagcaatgcaat

SEQ ID NO: 16093 - DNA, 26 bp, Gossypium hirsutum
cagaacttcttgcctgaaattcgtaa

SEQ ID NO: 16094 - DNA, 22 bp, Gossypium hirsutum
catcattatttcatctaattat

SEQ ID NO: 16095 - DNA, 22 bp, Gossypium hirsutum
catcattatttcatataattat

SEQ ID NO: 16096 - DNA, 26 bp, Gossypium hirsutum
cgcatgtgatgtttttctctttcagt

SEQ ID NO: 16097 - DNA, 27 bp, Gossypium hirsutum
ggaatatggcttccctatcttcttgat

SEQ ID NO: 16098 - DNA, 16 bp, Gossypium hirsutum
cttactaagaaaaccc

SEQ ID NO: 16099 - DNA, 16 bp, Gossypium hirsutum
cttactaaaaaaaccc

SEQ ID NO: 16100 - DNA, 26 bp, Gossypium hirsutum
aatccaagagctaacaagagggaaaa

SEQ ID NO: 16101 - DNA, 25 bp, Gossypium hirsutum
aactaatccttgtcggtctctcaac

SEQ ID NO: 16102 - DNA, 17 bp, Gossypium hirsutum
ccaaccagacttttgag

SEQ ID NO: 16103 - DNA, 15 bp, Gossypium hirsutum
caaccagactttgag

SEQ ID NO: 16104 - DNA, 27 bp, Gossypium hirsutum
agagcttaaaatttgtgactcccaagt

SEQ ID NO: 16105 - DNA, 37 bp, Gossypium hirsutum
ggtttacaaaatctaaaaacacactaatttgttgttc

SEQ ID NO: 16106 - DNA, 19 bp, Gossypium hirsutum
ttcaagtcctatgaaagag

SEQ ID NO: 16107 - DNA, 17 bp, Gossypium hirsutum
caagtcctaagaaagag

SEQ ID NO: 16108 - DNA, 25 bp, Gossypium hirsutum
atcgccaggacatacttgagttatg

SEQ ID NO: 16109 - DNA, 27 bp, Gossypium hirsutum
ttgtcaagagaaacaggaatgcaaaaa

SEQ ID NO: 16110 - DNA, 18 bp, Gossypium hirsutum
caaggacctttcatattg

SEQ ID NO: 16111 - DNA, 16 bp, Gossypium hirsutum
aggacctttaatattg

SEQ ID NO: 16112 - DNA, 25 bp, Gossypium hirsutum
aaaacctaggctcagagttcaatgg

SEQ ID NO: 16113 - DNA, 27 bp, Gossypium hirsutum
agaatgaacagctgaacctgaatactt

SEQ ID NO: 16114 - DNA, 15 bp, Gossypium hirsutum
cagtgatgggcatgc

SEQ ID NO: 16115 - DNA, 16 bp, Gossypium hirsutum
tcagtgatgtgcatgc

SEQ ID NO: 16116 - DNA, 30 bp, Gossypium hirsutum
gtaaatattgagcctctgatatgagctctt

SEQ ID NO: 16117 - DNA, 27 bp, Gossypium hirsutum
gtattcaaacccaaatttccacccaaa

SEQ ID NO: 16118 - DNA, 21 bp, Gossypium hirsutum
accctaaataataagaagaag

SEQ ID NO: 16119 - DNA, 22 bp, Gossypium hirsutum
caccctaaataataataagaag

SEQ ID NO: 16120 - DNA, 32 bp, Gossypium hirsutum
atgttattttccagtatctatgaggatttgca

SEQ ID NO: 16121 - DNA, 30 bp, Gossypium hirsutum
acaatagggtcaaagaaagatctctaagga

SEQ ID NO: 16122 - DNA, 18 bp, Gossypium hirsutum
ataatgtcacggatttga

SEQ ID NO: 16123 - DNA, 18 bp, Gossypium hirsutum
ataatgtcacagatttga

SEQ ID NO: 16124 - DNA, 25 bp, Gossypium hirsutum
tgcagcatatttgaggcttgtagaa

SEQ ID NO: 16125 - DNA, 32 bp, Gossypium hirsutum
cagttttgagacctaaatatctgctacttttt

SEQ ID NO: 16126 - DNA, 23 bp, Gossypium hirsutum
aacgttttaatcaatacttttat

SEQ ID NO: 16127 - DNA, 21 bp, Gossypium hirsutum
cgttttaatcaatactttcat

SEQ ID NO: 16128 - DNA, 31 bp, Gossypium hirsutum
aaaagaagcaagaagtacatgaggattatca

SEQ ID NO: 16129 - DNA, 23 bp, Gossypium hirsutum
gcccatcttcaatcaccagtttg

SEQ ID NO: 16130 - DNA, 23 bp, Gossypium hirsutum
tgattaattgaatctgtttctgt

SEQ ID NO: 16131 - DNA, 23 bp, Gossypium hirsutum
tgattaattgaatctgtttatgt

SEQ ID NO: 16132 - DNA, 22 bp, Gossypium hirsutum
catggcttggttggttgctttt

SEQ ID NO: 16133 - DNA, 25 bp, Gossypium hirsutum
aacttgaacagccgtaatcctactt

SEQ ID NO: 16134 - DNA, 15 bp, Gossypium hirsutum
caggaggaatcattc

SEQ ID NO: 16135 - DNA, 14 bp, Gossypium hirsutum
caggaggatcattc

SEQ ID NO: 16136 - DNA, 24 bp, Gossypium hirsutum
gaaaacgatgaagttgcagccatt

SEQ ID NO: 16137 - DNA, 26 bp, Gossypium hirsutum
ttgaaggtaactgaagaatgcatgga

SEQ ID NO: 16138 - DNA, 17 bp, Gossypium hirsutum
aaacagctatgcctttc

SEQ ID NO: 16139 - DNA, 17 bp, Gossypium hirsutum
aaacagctatacctttc

SEQ ID NO: 16140 - DNA, 26 bp, Gossypium hirsutum
ttttttgaaactagcaccatccttgc

SEQ ID NO: 16141 - DNA, 24 bp, Gossypium hirsutum
ggatcaatagcttgtccagcaatc

SEQ ID NO: 16142 - DNA, 16 bp, Gossypium hirsutum
tgctttctgtgcctgc

SEQ ID NO: 16143 - DNA, 17 bp, Gossypium hirsutum
atgctttctctgcctgc

SEQ ID NO: 16144 - DNA, 25 bp, Gossypium hirsutum
tctgtggatgtcaagagggaactta

SEQ ID NO: 16145 - DNA, 28 bp, Gossypium hirsutum
ccatctggttacttcttagatccctcaa

SEQ ID NO: 16146 - DNA, 18 bp, Gossypium hirsutum
ttggtccatacttctttt

SEQ ID NO: 16147 - DNA, 16 bp, Gossypium hirsutum
tggtccatactttttt

SEQ ID NO: 16148 - DNA, 40 bp, Gossypium hirsutum
tggatgctaatctaaataaattaaaaactgaaaaaggaaa

SEQ ID NO: 16149 - DNA, 25 bp, Gossypium hirsutum
tctcggagcctgtaaagttcagtat

SEQ ID NO: 16150 - DNA, 20 bp, Gossypium hirsutum
ttcatatctgtgatattgtg

SEQ ID NO: 16151 - DNA, 20 bp, Gossypium hirsutum
ttcatatctgtgatgttgtg

SEQ ID NO: 16152 - DNA, 25 bp, Gossypium hirsutum
cccagagctcataatgcttcaagtt

SEQ ID NO: 16153 - DNA, 20 bp, Gossypium hirsutum
ccaccgtattccgcaaaagg

SEQ ID NO: 16154 - DNA, 16 bp, Gossypium hirsutum
acaagtgcacacgaag

SEQ ID NO: 16155 - DNA, 15 bp, Gossypium hirsutum
caagtgcgcacgaag

SEQ ID NO: 16156 - DNA, 23 bp, Gossypium hirsutum
gctccagacaaaggcattttcag

SEQ ID NO: 16157 - DNA, 25 bp, Gossypium hirsutum
gcacctggaaatggaggatatgaaa

SEQ ID NO: 16158 - DNA, 19 bp, Gossypium hirsutum
atgaagtgaaacattaaca

SEQ ID NO: 16159 - DNA, 19 bp, Gossypium hirsutum
atgaagtgaaactttaaca

SEQ ID NO: 16160 - DNA, 27 bp, Gossypium hirsutum
gtgaggtatgtgttctctaatcacgaa

SEQ ID NO: 16161 - DNA, 25 bp, Gossypium hirsutum
acatgtgcgtttacttccataccat

SEQ ID NO: 16162 - DNA, 17 bp, Gossypium hirsutum
cattggcaatccattcc

SEQ ID NO: 16163 - DNA, 16 bp, Gossypium hirsutum
attggcaattcattcc

SEQ ID NO: 16164 - DNA, 24 bp, Gossypium hirsutum
caaggcaagttggaagaaagacat

SEQ ID NO: 16165 - DNA, 32 bp, Gossypium hirsutum
actaccacttatgtttgttgtgttatatggtt

SEQ ID NO: 16166 - DNA, 19 bp, Gossypium hirsutum
caatcaatcctaatagctg

SEQ ID NO: 16167 - DNA, 19 bp, Gossypium hirsutum
caatcaatcctagtagctg

SEQ ID NO: 16168 - DNA, 23 bp, Gossypium hirsutum
gctcattctcctgcatcgtaaac

SEQ ID NO: 16169 - DNA, 33 bp, Gossypium hirsutum
gcttctttttgttttttaaactttttccttccc

SEQ ID NO: 16170 - DNA, 18 bp, Gossypium hirsutum
ctaactttctgctttttg

SEQ ID NO: 16171 - DNA, 18 bp, Gossypium hirsutum
ctaactttctgttttttg

SEQ ID NO: 16172 - DNA, 26 bp, Gossypium hirsutum
gggatgtagttgaagtctggaaaagg

SEQ ID NO: 16173 - DNA, 44 bp, Gossypium hirsutum
gtcaacgtaaaactattaataagattatgtgtataaaagaagac

SEQ ID NO: 16174 - DNA, 18 bp, Gossypium hirsutum
ttctatagccaagggcca

SEQ ID NO: 16175 - DNA, 18 bp, Gossypium hirsutum
ttctatagccacgggcca

SEQ ID NO: 16176 - DNA, 28 bp, Gossypium hirsutum
gtgggagagtagaattttgacatgatct

SEQ ID NO: 16177 - DNA, 29 bp, Gossypium hirsutum
ctggaatgtaagagagtattagggaggat

SEQ ID NO: 16178 - DNA, 19 bp, Gossypium hirsutum
atgtatgaacacatgatct

SEQ ID NO: 16179 - DNA, 19 bp, Gossypium hirsutum
atgtatgaacacgtgatct

SEQ ID NO: 16180 - DNA, 25 bp, Gossypium hirsutum
tggcaatatggaagaagctagcaat

SEQ ID NO: 16181 - DNA, 31 bp, Gossypium hirsutum
acataaataattatgcgaacaaaaagctgca

SEQ ID NO: 16182 - DNA, 16 bp, Gossypium hirsutum
ccagcttaagaccacc

SEQ ID NO: 16183 - DNA, 17 bp, Gossypium hirsutum
tccagcttaataccacc

SEQ ID NO: 16184 - DNA, 22 bp, Gossypium hirsutum
gctagtgctgggcatgaaaaga

SEQ ID NO: 16185 - DNA, 28 bp, Gossypium hirsutum
tggaaaaggaaatgtcaccttaaagtga

SEQ ID NO: 16186 - DNA, 19 bp, Gossypium hirsutum
atatgcccatactgtaaac

SEQ ID NO: 16187 - DNA, 16 bp, Gossypium hirsutum
tgcccatagtgtaaac

SEQ ID NO: 16188 - DNA, 20 bp, Gossypium hirsutum
cgatggtgacctgcttggtt

SEQ ID NO: 16189 - DNA, 25 bp, Gossypium hirsutum
tgcgtaggtaagggtttcatttcat

SEQ ID NO: 16190 - DNA, 21 bp, Gossypium hirsutum
caaaaatgtgtatggtaatat

SEQ ID NO: 16191 - DNA, 22 bp, Gossypium hirsutum
acaaaaatgtgtatagtaatat

SEQ ID NO: 16192 - DNA, 33 bp, Gossypium hirsutum
aagaaaatttactattaacaatggcaggaaagg

SEQ ID NO: 16193 - DNA, 35 bp, Gossypium hirsutum; identical to SEQ ID NO: 15253

SEQ ID NO: 16194 - DNA, 20 bp, Gossypium hirsutum
aatttggaatcaaaataaaa

SEQ ID NO: 16195 - DNA, 18 bp, Gossypium hirsutum
atttggaatcaaataaaa

SEQ ID NO: 16196 - DNA, 28 bp, Gossypium hirsutum
gggtgaattggtaaaatttaaaggaggt

SEQ ID NO: 16197 - DNA, 25 bp, Gossypium hirsutum
tccgtgtcaaaacttgttcttctct

SEQ ID NO: 16198 - DNA, 21 bp, Gossypium hirsutum
caagataattagatgaaataa

SEQ ID NO: 16199 - DNA, 22 bp, Gossypium hirsutum
acaagataattagatggaataa

SEQ ID NO: 16200 - DNA, 24 bp, Gossypium hirsutum
gtgggaatctggcattgaactttt

SEQ ID NO: 16201 - DNA, 25 bp, Gossypium hirsutum
tcgaagttctccaattcatgggatt

SEQ ID NO: 16202 - DNA, 16 bp, Gossypium hirsutum
acagaccactctcttg

SEQ ID NO: 16203 - DNA, 15 bp, Gossypium hirsutum
cagacccctctcttg

SEQ ID NO: 16204 - DNA, 27 bp, Gossypium hirsutum
gtttgttagtaatgttttggccttcca

SEQ ID NO: 16205 - DNA, 29 bp, Gossypium hirsutum
gcgtacaagaattttggtaaacactaaca

SEQ ID NO: 16206 - DNA, 19 bp, Gossypium hirsutum
atcttgactgaacctactc

SEQ ID NO: 16207 - DNA, 16 bp, Gossypium hirsutum
ttgactgagcctactc

SEQ ID NO: 16208 - DNA, 25 bp, Gossypium hirsutum
ggaagaatacacttgttgctgttgt

SEQ ID NO: 16209 - DNA, 23 bp, Gossypium hirsutum
tgatgcattgggcggtatatgtc

SEQ ID NO: 16210 - DNA, 15 bp, Gossypium hirsutum
tctatgccaaatctt

SEQ ID NO: 16211 - DNA, 16 bp, Gossypium hirsutum
atctatgcaaaatctt

SEQ ID NO: 16212 - DNA, 26 bp, Gossypium hirsutum
ggaccttctatttgttgtttgcttgt

SEQ ID NO: 16213 - DNA, 25 bp, Gossypium hirsutum
ggtcatctgaggatgtgtactctga

SEQ ID NO: 16214 - DNA, 17 bp, Gossypium hirsutum
tggttctccaatgctga

SEQ ID NO: 16215 - DNA, 17 bp, Gossypium hirsutum
tggttctccagtgctga

SEQ ID NO: 16216 - DNA, 26 bp, Gossypium hirsutum
tcacataactcccagtagaggttctc

SEQ ID NO: 16217 - DNA, 23 bp, Gossypium hirsutum
tcgaaccgacgacattcattgtt

SEQ ID NO: 16218 - DNA, 17 bp, Gossypium hirsutum
ccttgtttccatccaac

SEQ ID NO: 16219 - DNA, 18 bp, Gossypium hirsutum
tccttgtttccttccaac

SEQ ID NO: 16220 - DNA, 24 bp, Gossypium hirsutum
gctgtggcaattggaagaacattt

SEQ ID NO: 16221 - DNA, 31 bp, Gossypium hirsutum
tgactttatgagagcagaacaagattaacag

SEQ ID NO: 16222 - DNA, 15 bp, Gossypium hirsutum
tgcctttcaaagaag

SEQ ID NO: 16223 - DNA, 16 bp, Gossypium hirsutum
atgccttttaaagaag

SEQ ID NO: 16224 - DNA, 24 bp, Gossypium hirsutum
tgcatcttaagagggtctcctgaa

SEQ ID NO: 16225 - DNA, 28 bp, Gossypium hirsutum
ttgttgctgtctacttgtattcactctt

SEQ ID NO: 16226 - DNA, 17 bp, Gossypium hirsutum
catagcaaaggcacctc

SEQ ID NO: 16227 - DNA, 19 bp, Gossypium hirsutum
aacatagaaaaggcacctc

SEQ ID NO: 16228 - DNA, 38 bp, Gossypium hirsutum
aatcaataatgaccagataatttatggatgcatagtaa

SEQ ID NO: 16229 - DNA, 26 bp, Gossypium hirsutum
tgcttgttcattcttcaatgctctct

SEQ ID NO: 16230 - DNA, 20 bp, Gossypium hirsutum
tgtgtcacttaaccccctaa

SEQ ID NO: 16231 - DNA, 20 bp, Gossypium hirsutum
tgtgtcacttaactccctaa

SEQ ID NO: 16232 - DNA, 28 bp, Gossypium hirsutum
ggcttcaaagcaaccaattttaagatga

SEQ ID NO: 16233 - DNA, 26 bp, Gossypium hirsutum
cctccattttacagtaggaagccaaa

SEQ ID NO: 16234 - DNA, 23 bp, Gossypium hirsutum
atccttctctttatgattatatt

SEQ ID NO: 16235 - DNA, 21 bp, Gossypium hirsutum
ccttctctttatgaatatatt

SEQ ID NO: 16236 - DNA, 24 bp, Gossypium hirsutum
cttcttgagctaacagtggagtct

SEQ ID NO: 16237 - DNA, 32 bp, Gossypium hirsutum
gtgcatatattgaagattcgatcatatgttgt

SEQ ID NO: 16238 - DNA, 22 bp, Gossypium hirsutum
ttagatctcattattaaatttt

SEQ ID NO: 16239 - DNA, 18 bp, Gossypium hirsutum
atctcattatcaaatttt

SEQ ID NO: 16240 - DNA, 22 bp, Gossypium hirsutum
cctctcgcaattgcaactcatg

SEQ ID NO: 16241 - DNA, 32 bp, Gossypium hirsutum
gattaagcattatttccttttctcttgttggg

SEQ ID NO: 16242 - DNA, 19 bp, Gossypium hirsutum
caactgctctctatagtct

SEQ ID NO: 16243 - DNA, 18 bp, Gossypium hirsutum
aactgctctctgtagtct

SEQ ID NO: 16244 - DNA, 31 bp, Gossypium hirsutum
ggaaataccataaaattagtactaccccaca

SEQ ID NO: 16245 - DNA, 48 bp, Gossypium hirsutum
caacctcaaaataatactaaactctaaattttatattttactttgttg

SEQ ID NO: 16246 - DNA, 20 bp, Gossypium hirsutum
aactattagccctaattatt

SEQ ID NO: 16247 - DNA, 22 bp, Gossypium hirsutum
taaactattaaccctaattatt

SEQ ID NO: 16248 - DNA, 45 bp, Gossypium hirsutum
ttcaactttaattattccacttaattaaataataatgacgctaaa

SEQ ID NO: 16249 - DNA, 23 bp, Gossypium hirsutum
tgcaccttcaagccaatttaagc

SEQ ID NO: 16250 - DNA, 22 bp, Gossypium hirsutum
ataggttaataaagagcttttt

SEQ ID NO: 16251 - DNA, 21 bp, Gossypium hirsutum
taggttaataaagaacttttt

SEQ ID NO: 16252 - DNA, 25 bp, Gossypium hirsutum
agaggtcagttgaatggttggaaat

SEQ ID NO: 16253 - DNA, 23 bp, Gossypium hirsutum
tgcaacaaccattggcattttct

SEQ ID NO: 16254 - DNA, 19 bp, Gossypium hirsutum
acaagaagatcatactctc

SEQ ID NO: 16255 - DNA, 17 bp, Gossypium hirsutum
aagaagatcagactctc

SEQ ID NO: 16256 - DNA, 27 bp, Gossypium hirsutum
acaagtggactagtaaatgcaaactca

SEQ ID NO: 16257 - DNA, 21 bp, Gossypium hirsutum
catcagatgtcccagctgcat

SEQ ID NO: 16258 - DNA, 19 bp, Gossypium hirsutum
agatgaatgatgtaaatga

SEQ ID NO: 16259 - DNA, 20 bp, Gossypium hirsutum
cagatgaatgatgtagatga

SEQ ID NO: 16260 - DNA, 19 bp, Gossypium hirsutum
acccatcccctgcctcata

SEQ ID NO: 16261 - DNA, 24 bp, Gossypium hirsutum
gagtgggaagggttaggttagaga

SEQ ID NO: 16262 - DNA, 26 bp, Gossypium hirsutum
ttttatattttagagatcaaattagt

SEQ ID NO: 16263 - DNA, 19 bp, Gossypium hirsutum
ttttagagatcaaattggt

SEQ ID NO: 16264 - DNA, 25 bp, Gossypium hirsutum
gctacatttttgccactcatccatt

SEQ ID NO: 16265 - DNA, 23 bp, Gossypium hirsutum
gtggacgagttggtcatactgtt

SEQ ID NO: 16266 - DNA, 21 bp, Gossypium hirsutum
aaaacgataatagcacttatg

SEQ ID NO: 16267 - DNA, 21 bp, Gossypium hirsutum
aaaacgataatagaacttatg

SEQ ID NO: 16268 - DNA, 24 bp, Gossypium hirsutum
agtgagcctgcataaactgatcat

SEQ ID NO: 16269 - DNA, 25 bp, Gossypium hirsutum
cccgcatatttcctgtgatgttttc

SEQ ID NO: 16270 - DNA, 17 bp, Gossypium hirsutum
catccaaattttttttc

SEQ ID NO: 16271 - DNA, 17 bp, Gossypium hirsutum
catccaatttttttttc

SEQ ID NO: 16272 - DNA, 26 bp, Gossypium hirsutum
ggtttcaaggagttgacgacttaact

SEQ ID NO: 16273 - DNA, 32 bp, Gossypium hirsutum
cctaggttttacatgttagaattgaaggttct

SEQ ID NO: 16274 - DNA, 17 bp, Gossypium hirsutum
tcttgagcctggaccgt

SEQ ID NO: 16275 - DNA, 18 bp, Gossypium hirsutum
ctcttgagccttgaccgt

SEQ ID NO: 16276 - DNA, 31 bp, Gossypium hirsutum
ctgaatctgcacaataaccaaaataactctt

SEQ ID NO: 16277 - DNA, 29 bp, Gossypium hirsutum
gttagagattagtctccttcttcccctat

SEQ ID NO: 16278 - DNA, 21 bp, Gossypium hirsutum
ccatttctttttttaggaaaa

SEQ ID NO: 16279 - DNA, 20 bp, Gossypium hirsutum
catttcttttttcaggaaaa

SEQ ID NO: 16280 - DNA, 26 bp, Gossypium hirsutum
cagaaccctaactgacaaatcatcca

SEQ ID NO: 16281 - DNA, 19 bp, Gossypium hirsutum
tgacacagcagctgcaaca

SEQ ID NO: 16282 - DNA, 17 bp, Gossypium hirsutum
cagtaggagcaccacct

SEQ ID NO: 16283 - DNA, 16 bp, Gossypium hirsutum
agtaggagcgccacct

SEQ ID NO: 16284 - DNA, 23 bp, Gossypium hirsutum
ctcctattgtcatgcctggtgtt

SEQ ID NO: 16285 - DNA, 29 bp, Gossypium hirsutum
aatgataaaaacacacctcagttcttcct

SEQ ID NO: 16286 - DNA, 20 bp, Gossypium hirsutum
cataataggcttgccagcat

SEQ ID NO: 16287 - DNA, 20 bp, Gossypium hirsutum
cataataggctttccagcat

SEQ ID NO: 16288 - DNA, 23 bp, Gossypium hirsutum
acaggttgcatacttgctgagtt

SEQ ID NO: 16289 - DNA, 34 bp, Gossypium hirsutum
gggatcaatcgtgaattaaatattatcctaacct

SEQ ID NO: 16290 - DNA, 17 bp, Gossypium hirsutum
tctcgagcctttacttt

SEQ ID NO: 16291 - DNA, 16 bp, Gossypium hirsutum
ctcgagcccttacttt

SEQ ID NO: 16292 - DNA, 42 bp, Gossypium hirsutum
catgttctaactataacaatatgtttttcattagtatcgaaa

SEQ ID NO: 16293 - DNA, 30 bp, Gossypium hirsutum
ccctatagagttagattaggtcagaatccg

SEQ ID NO: 16294 - DNA, 20 bp, Gossypium hirsutum
cagttttgagttcttttcta

SEQ ID NO: 16295 - DNA, 19 bp, Gossypium hirsutum
agttttgagttgttttcta

SEQ ID NO: 16296 - DNA, 27 bp, Gossypium hirsutum
gattattgacgtgatttctgcacaact

SEQ ID NO: 16297 - DNA, 28 bp, Gossypium hirsutum
gggcataactatctgcttcttcgatatt

SEQ ID NO: 16298 - DNA, 24 bp, Gossypium hirsutum
ataattttaaaggtatttaatttc

SEQ ID NO: 16299 - DNA, 25 bp, Gossypium hirsutum
aataattttaaagatatttaatttc

SEQ ID NO: 16300 - DNA, 35 bp, Gossypium hirsutum
ctctttatagaagcaattttatttcaagttgtggt

SEQ ID NO: 16301 - DNA, 23 bp, Gossypium hirsutum
agccttcgtctttatgtgcgtta

SEQ ID NO: 16302 - DNA, 21 bp, Gossypium hirsutum
ccgtgaaaataatcaccagtg

SEQ ID NO: 16303 - DNA, 21 bp, Gossypium hirsutum
ccgtgaaaataatccccagtg

SEQ ID NO: 16304 - DNA, 25 bp, Gossypium hirsutum
cattgctcgaggaagagaagagaat

SEQ ID NO: 16305 - DNA, 24 bp, Gossypium hirsutum
tgctccgaatatgctacaagcaaa

SEQ ID NO: 16306 - DNA, 15 bp, Gossypium hirsutum
acattggaggaaatg

SEQ ID NO: 16307 - DNA, 15 bp, Gossypium hirsutum
acattggaagaaatg

SEQ ID NO: 16308 - DNA, 20 bp, Gossypium hirsutum
cgcgtaccatgcttgatcag

SEQ ID NO: 16309 - DNA, 28 bp, Gossypium hirsutum
gagtttctcaacaggattttctgattcc

SEQ ID NO: 16310 - DNA, 15 bp, Gossypium hirsutum
tcttgggacgtcttc

SEQ ID NO: 16311 - DNA, 16 bp, Gossypium hirsutum
ctcttggtacgtcttc

SEQ ID NO: 16312 - DNA, 24 bp, Gossypium hirsutum
gatggaagtttagcggagttagct

SEQ ID NO: 16313 - DNA, 25 bp, Gossypium hirsutum
agccacagtaatgagtcatttgaca

SEQ ID NO: 16314 - DNA, 17 bp, Gossypium hirsutum
catggctctagatgttt

SEQ ID NO: 16315 - DNA, 16 bp, Gossypium hirsutum
atggctctaaatgttt

SEQ ID NO: 16316 - DNA, 24 bp, Gossypium hirsutum
aggccaactcagtgcaagtaaatt

SEQ ID NO: 16317 - DNA, 25 bp, Gossypium hirsutum
tcagttagaagcaacagttgcgtat

SEQ ID NO: 16318 - DNA, 20 bp, Gossypium hirsutum
ttgatctgatcctttaactg

SEQ ID NO: 16319 - DNA, 17 bp, Gossypium hirsutum
atctggtcctttaactg

SEQ ID NO: 16320 - DNA, 39 bp, Gossypium hirsutum
gaagagttttttctttcttaacttctctatttttacaca

SEQ ID NO: 16321 - DNA, 29 bp, Gossypium hirsutum
tcaatgttggacatgggtactttaagaaa

SEQ ID NO: 16322 - DNA, 19 bp, Gossypium hirsutum
cataaaaacttggaaccta

SEQ ID NO: 16323 - DNA, 20 bp, Gossypium hirsutum
ccataaaaacttagaaccta

SEQ ID NO: 16324 - DNA, 29 bp, Gossypium hirsutum
tgtcagatacgtagttggattattgtcct

SEQ ID NO: 16325 - DNA, 25 bp, Gossypium hirsutum
tccatcgtccctcatgtcatcttat

SEQ ID NO: 16326 - DNA, 20 bp, Gossypium hirsutum
aaagaagaagaagcagaaag

SEQ ID NO: 16327 - DNA, 20 bp, Gossypium hirsutum
aaagaagaagaaacagaaag

SEQ ID NO: 16328 - DNA, 23 bp, Gossypium hirsutum
cctagtgtttggcctctgctttt

SEQ ID NO: 16329 - DNA, 25 bp, Gossypium hirsutum
ccgtggaagaatttcatgacactgt

SEQ ID NO: 16330 - DNA, 17 bp, Gossypium hirsutum
actgagcttcttgccgc

SEQ ID NO: 16331 - DNA, 17 bp, Gossypium hirsutum
actgagctttttgccgc

SEQ ID NO: 16332 - DNA, 25 bp, Gossypium hirsutum
ctgccataactgtctgttggtacat

SEQ ID NO: 16333 - DNA, 25 bp, Gossypium hirsutum
cctcagtcagccaataagcatttct

SEQ ID NO: 16334 - DNA, 26 bp, Gossypium hirsutum
tttagataataaagataaagataaac

SEQ ID NO: 16335 - DNA, 25 bp, Gossypium hirsutum
ttagataataaagatatagataaac

SEQ ID NO: 16336 - DNA, 29 bp, Gossypium hirsutum
tggaattagcacacattctaaatgacctt

SEQ ID NO: 16337 - DNA, 34 bp, Gossypium hirsutum
tcacaaacaatcattctattttggtttgaatcaa

SEQ ID NO: 16338 - DNA, 17 bp, Gossypium hirsutum
ctagcttcgataaataa

SEQ ID NO: 16339 - DNA, 17 bp, Gossypium hirsutum
ctagcttccataaataa

SEQ ID NO: 16340 - DNA, 25 bp, Gossypium hirsutum
gccttgttgaatgtgcatgattagt

SEQ ID NO: 16341 - DNA, 31 bp, Gossypium hirsutum
gatctcattaagtcattgtgttgaaaatgca

SEQ ID NO: 16342 - DNA, 16 bp, Gossypium hirsutum
ccctatggccacctta

SEQ ID NO: 16343 - DNA, 16 bp, Gossypium hirsutum
tccctatggcacctta

SEQ ID NO: 16344 - DNA, 25 bp, Gossypium hirsutum
cccatgctgcgattaatacctatga

SEQ ID NO: 16345 - DNA, 24 bp, Gossypium hirsutum
gaagggaggttcgcatatttcact

SEQ ID NO: 16346 - DNA, 14 bp, Gossypium hirsutum
ccttggacaatgcg

SEQ ID NO: 16347 - DNA, 14 bp, Gossypium hirsutum
ccttggacgatgcg

SEQ ID NO: 16348 - DNA, 25 bp, Gossypium hirsutum
gctatggttgacgaagacaattgtg

SEQ ID NO: 16349 - DNA, 33 bp, Gossypium hirsutum
agcatggttaaaagccttctattaaatttttgt

SEQ ID NO: 16350 - DNA, 25 bp, Gossypium hirsutum
ttagttagagttttttttaatttat

SEQ ID NO: 16351 - DNA, 24 bp, Gossypium hirsutum
ttagttagagtttttttaatttat

SEQ ID NO: 16352 - DNA, 42 bp, Gossypium hirsutum
ccattaaaattattttactaaaatcgttgatgtgacacttta

SEQ ID NO: 16353 - DNA, 25 bp, Gossypium hirsutum
gcatgttagcgcatctgagttgata

SEQ ID NO: 16354 - DNA, 21 bp, Gossypium hirsutum
ataagctttttttcctttttc

SEQ ID NO: 16355 - DNA, 18 bp, Gossypium hirsutum
aagcttttttcctttttc

SEQ ID NO: 16356 - DNA, 29 bp, Gossypium hirsutum
cagagcaaataaatctctaacggtaagga

SEQ ID NO: 16357 - DNA, 31 bp, Gossypium hirsutum
tcagcatcaactccatttttatttcattgtt

SEQ ID NO: 16358 - DNA, 22 bp, Gossypium hirsutum
cccattataatcaactgttatt

SEQ ID NO: 16359 - DNA, 22 bp, Gossypium hirsutum
cccattataatcaattgttatt

SEQ ID NO: 16360 - DNA, 29 bp, Gossypium hirsutum
tgtatcaagtacacaagaaggaaaatggt

SEQ ID NO: 16361 - DNA, 32 bp, Gossypium hirsutum
gctcttatcatagagagatgagaatttccaaa

SEQ ID NO: 16362 - DNA, 20 bp, Gossypium hirsutum
catgtttttacccaaatata

SEQ ID NO: 16363 - DNA, 19 bp, Gossypium hirsutum
atgtttttaccgaaatata

SEQ ID NO: 16364 - DNA, 31 bp, Gossypium hirsutum
agacttgcaattcttttccaatatcagaaac

SEQ ID NO: 16365 - DNA, 28 bp, Gossypium hirsutum
ggttcacagtagggtttatggtaaaagt

SEQ ID NO: 16366 - DNA, 20 bp, Gossypium hirsutum
aaacagcatttacattaaaa

SEQ ID NO: 16367 - DNA, 19 bp, Gossypium hirsutum
aacagcatttacatgaaaa

SEQ ID NO: 16368 - DNA, 28 bp, Gossypium hirsutum
acaaagttatttttcgccaccaaaatca

SEQ ID NO: 16369 - DNA, 26 bp, Gossypium hirsutum
acaagcaagggaatatcattctccaa

SEQ ID NO: 16370 - DNA, 17 bp, Gossypium hirsutum
agaagaccgatgggtac

SEQ ID NO: 16371 - DNA, 15 bp, Gossypium hirsutum
aagaccgacgggtac

SEQ ID NO: 16372 - DNA, 20 bp, Gossypium hirsutum
ggcatcgttgctccatagga

SEQ ID NO: 16373 - DNA, 23 bp, Gossypium hirsutum
gggctagtccacatcacagaaaa

SEQ ID NO: 16374 - DNA, 18 bp, Gossypium hirsutum
tgaaaatggtgacattaa

SEQ ID NO: 16375 - DNA, 19 bp, Gossypium hirsutum
ctgaaaatggttacattaa

SEQ ID NO: 16376 - DNA, 42 bp, Gossypium hirsutum
cttactatagtcagaattattactatctactagtttctggat

SEQ ID NO: 16377 - DNA, 22 bp, Gossypium hirsutum
cgcatttgatgaggtgcatacc

SEQ ID NO: 16378 - DNA, 22 bp, Gossypium hirsutum
actttttttaagtcaataggca

SEQ ID NO: 16379 - DNA, 21 bp, Gossypium hirsutum
ctttttttaagtcgataggca

SEQ ID NO: 16380 - DNA, 26 bp, Gossypium hirsutum
aattcgaagagagtttcagagaggtg

SEQ ID NO: 16381 - DNA, 22 bp, Gossypium hirsutum
gcaccttgtctttgctgatgac

SEQ ID NO: 16382 - DNA, 18 bp, Gossypium hirsutum
ctttgaaagctggaataa

SEQ ID NO: 16383 - DNA, 18 bp, Gossypium hirsutum
ctttgaaagctcgaataa

SEQ ID NO: 16384 - DNA, 25 bp, Gossypium hirsutum
gctttgctaataacatgcactgtct

SEQ ID NO: 16385 - DNA, 23 bp, Gossypium hirsutum
gactggaaccagttagcttcctt

SEQ ID NO: 16386 - DNA, 18 bp, Gossypium hirsutum
atgttaagggtcattctg

SEQ ID NO: 16387 - DNA, 17 bp, Gossypium hirsutum
tgttaagggtcgttctg

SEQ ID NO: 16388 - DNA, 25 bp, Gossypium hirsutum
caggaagatgtttaccgagtttcac

SEQ ID NO: 16389 - DNA, 32 bp, Gossypium hirsutum
tgcccaaaatattcttgtagttaatgatctca

SEQ ID NO: 16390 - DNA, 19 bp, Gossypium hirsutum
caaaatgcattccgaataa

SEQ ID NO: 16391 - DNA, 16 bp, Gossypium hirsutum
aatgcattccaaataa

SEQ ID NO: 16392 - DNA, 23 bp, Gossypium hirsutum
aacaaccacttcccactttcaga

SEQ ID NO: 16393 - DNA, 28 bp, Gossypium hirsutum
cttgtgttagtaggtttaaggagtgtga

SEQ ID NO: 16394 - DNA, 22 bp, Gossypium hirsutum
acctcatcattaatatttttat

SEQ ID NO: 16395 - DNA, 21 bp, Gossypium hirsutum
cctcatcattaatatatttat

SEQ ID NO: 16396 - DNA, 28 bp, Gossypium hirsutum
acaaatacacatccctacaaaactcaga

SEQ ID NO: 16397 - DNA, 25 bp, Gossypium hirsutum
cctgatgattggaatagaccagcaa

SEQ ID NO: 16398 - DNA, 19 bp, Gossypium hirsutum
cttcctcatagtacaaatg

SEQ ID NO: 16399 - DNA, 17 bp, Gossypium hirsutum
tcctcatagaacaaatg

SEQ ID NO: 16400 - DNA, 23 bp, Gossypium hirsutum
gggtactgggctaacatccatag

SEQ ID NO: 16401 - DNA, 25 bp, Gossypium hirsutum
gcttcctaatttgcacagacatacc

SEQ ID NO: 16402 - DNA, 17 bp, Gossypium hirsutum
ctctctctctctccccc

SEQ ID NO: 16403 - DNA, 16 bp, Gossypium hirsutum
tctctctctccccccc

SEQ ID NO: 16404 - DNA, 34 bp, Gossypium hirsutum
ttgtttgattgcataatagagaatttctttgctt

SEQ ID NO: 16405 - DNA, 27 bp, Gossypium hirsutum
gggatggagaagatgatgtggatatct

SEQ ID NO: 16406 - DNA, 21 bp, Gossypium hirsutum
cttctatgtaatcgtcatctc

SEQ ID NO: 16407 - DNA, 21 bp, Gossypium hirsutum
cttctatgtaatcatcatctc

SEQ ID NO: 16408 - DNA, 25 bp, Gossypium hirsutum
caacactacctgatttgtgctttga

SEQ ID NO: 16409 - DNA, 35 bp, Gossypium hirsutum
gacttaaatgaaaatttttgaatagttcaatggca

SEQ ID NO: 16410 - DNA, 19 bp, Gossypium hirsutum
accaaaacaaaaatttact

SEQ ID NO: 16411 - DNA, 19 bp, Gossypium hirsutum
accaaaacaaaagtttact

SEQ ID NO: 16412 - DNA, 31 bp, Gossypium hirsutum
gccaagggctaaatcaaaatcagaaataaaa

SEQ ID NO: 16413 - DNA, 30 bp, Gossypium hirsutum
gcctaccatgttttcttctatcatacatct

SEQ ID NO: 16414 - DNA, 16 bp, Gossypium hirsutum
catcacaaggaagctg

SEQ ID NO: 16415 - DNA, 16 bp, Gossypium hirsutum
catcacaagggagctg

SEQ ID NO: 16416 - DNA, 20 bp, Gossypium hirsutum
gcccagcttgaaccttgttc

SEQ ID NO: 16417 - DNA, 24 bp, Gossypium hirsutum
tcaaaccaccaacttgaggcttat

SEQ ID NO: 16418 - DNA, 25 bp, Gossypium hirsutum
attatttacataatcacactcacac

SEQ ID NO: 16419 - DNA, 21 bp, Gossypium hirsutum
tttacataatcacgctcacac

SEQ ID NO: 16420 - DNA, 28 bp, Gossypium hirsutum
tcacagacctataaaactcaggagaagt

SEQ ID NO: 16421 - DNA, 26 bp, Gossypium hirsutum
gcctgaaaatatgaacgagtcgctaa

SEQ ID NO: 16422 - DNA, 17 bp, Gossypium hirsutum
cagatgcttgaatgtag

SEQ ID NO: 16423 - DNA, 17 bp, Gossypium hirsutum
cagatgcttcaatgtag

SEQ ID NO: 16424 - DNA, 23 bp, Gossypium hirsutum
tcctttggcaaaacaatgcaaca

SEQ ID NO: 16425 - DNA, 21 bp, Gossypium hirsutum
cgaacctgaggtaggcagatt

SEQ ID NO: 16426 - DNA, 17 bp, Gossypium hirsutum
atcccttggttgaccat

SEQ ID NO: 16427 - DNA, 15 bp, Gossypium hirsutum
cccttgggtgaccat

SEQ ID NO: 16428 - DNA, 25 bp, Gossypium hirsutum
ccatggaatggcaagaatagggaat

SEQ ID NO: 16429 - DNA, 27 bp, Gossypium hirsutum
cagatgatatttcccaacctgagaaca

SEQ ID NO: 16430 - DNA, 15 bp, Gossypium hirsutum
ccaatgaccaaagtt

SEQ ID NO: 16431 - DNA, 15 bp, Gossypium hirsutum
ccaatgaacaaagtt

SEQ ID NO: 16432 - DNA, 29 bp, Gossypium hirsutum
tgttttgcacctcaaagtcttttttatgg

SEQ ID NO: 16433 - DNA, 34 bp, Gossypium hirsutum
gcattggacaatcatagtaagtaataacagaatc

SEQ ID NO: 16434 - DNA, 22 bp, Gossypium hirsutum
ctttatactcaactttgttatc

SEQ ID NO: 16435 - DNA, 18 bp, Gossypium hirsutum
atactcaacgttgttatc

SEQ ID NO: 16436 - DNA, 26 bp, Gossypium hirsutum
gcactcctagttatcgacttcttcca

SEQ ID NO: 16437 - DNA, 22 bp, Gossypium hirsutum
gagcacacagcattgttgtagc

SEQ ID NO: 16438 - DNA, 19 bp, Gossypium hirsutum
atagctctcaactttatgc

SEQ ID NO: 16439 - DNA, 19 bp, Gossypium hirsutum
atagctctcaattttatgc

SEQ ID NO: 16440 - DNA, 25 bp, Gossypium hirsutum
tggaagcaccttagttagtgtagct

SEQ ID NO: 16441 - DNA, 28 bp, Gossypium hirsutum
cctctccgtaactatcttagcaaattga

SEQ ID NO: 16442 - DNA, 17 bp, Gossypium hirsutum
caacgacttaatttatc

SEQ ID NO: 16443 - DNA, 16 bp, Gossypium hirsutum
aacgacttgatttatc

SEQ ID NO: 16444 - DNA, 33 bp, Gossypium hirsutum
cacgtgattttacaaactatagaacaatgacaa

SEQ ID NO: 16445 - DNA, 20 bp, Gossypium hirsutum
gcggctcagtcttcaaatgc

SEQ ID NO: 16446 - DNA, 17 bp, Gossypium hirsutum
ctgctcttcccccagac

SEQ ID NO: 16447 - DNA, 16 bp, Gossypium hirsutum
tgctcttccgccagac

SEQ ID NO: 16448 - DNA, 21 bp, Gossypium hirsutum
gctgttgtgcaaggacttcag

SEQ ID NO: 16449 - DNA, 25 bp, Gossypium hirsutum
gctgttgacctcccgtattgttatt

SEQ ID NO: 16450 - DNA, 17 bp, Gossypium hirsutum
ccggctactccatgaga

SEQ ID NO: 16451 - DNA, 16 bp, Gossypium hirsutum
cggctactcaatgaga

SEQ ID NO: 16452 - DNA, 26 bp, Gossypium hirsutum
gagtcttctcaggataacgaggtttt

SEQ ID NO: 16453 - DNA, 25 bp, Gossypium hirsutum
atgcaattaggcactggaatactca

SEQ ID NO: 16454 - DNA, 17 bp, Gossypium hirsutum
ttacctctggataactt

SEQ ID NO: 16455 - DNA, 15 bp, Gossypium hirsutum
acctctgcataactt

SEQ ID NO: 16456 - DNA, 28 bp, Gossypium hirsutum
acagaatattagaaaatgcgttgcttgc

SEQ ID NO: 16457 - DNA, 24 bp, Gossypium hirsutum
tgcctctggaggtaatagttctgt

SEQ ID NO: 16458 - DNA, 17 bp, Gossypium hirsutum
actccgaatcaagtatc

SEQ ID NO: 16459 - DNA, 15 bp, Gossypium hirsutum
tccgaaccaagtatc

SEQ ID NO: 16460 - DNA, 35 bp, Gossypium hirsutum
agaaacatttgcattttaatctaattcacaacagt

SEQ ID NO: 16461 - DNA, 21 bp, Gossypium hirsutum
caagctgctggtttggctatg

SEQ ID NO: 16462 - DNA, 17 bp, Gossypium hirsutum
cttgttttcatatttcc

SEQ ID NO: 16463 - DNA, 18 bp, Gossypium hirsutum
tcttgttttcctatttcc

SEQ ID NO: 16464 - DNA, 24 bp, Gossypium hirsutum
agggtaagcctttgcaacattctt

SEQ ID NO: 16465 - DNA, 30 bp, Gossypium hirsutum
gccttttttgaatctgttcattgatgatgt

SEQ ID NO: 16466 - DNA, 20 bp, Gossypium hirsutum
ttgattctgtagatgaaaat

SEQ ID NO: 16467 - DNA, 17 bp, Gossypium hirsutum
attctgtagaggaaaat

SEQ ID NO: 16468 - DNA, 28 bp, Gossypium hirsutum
catctcaaaggaaaattagggtcaggat

SEQ ID NO: 16469 - DNA, 33 bp, Gossypium hirsutum
tgtacatgtatgtctcaatagtttcatcaaaca

SEQ ID NO: 16470 - DNA, 18 bp, Gossypium hirsutum
tccttgcgatttttaaat

SEQ ID NO: 16471 - DNA, 17 bp, Gossypium hirsutum
ccttgcgattcttaaat

SEQ ID NO: 16472 - DNA, 28 bp, Gossypium hirsutum
agactggaaatatagggctatcaatcga

SEQ ID NO: 16473 - DNA, 26 bp, Gossypium hirsutum
aagcaacaataagggacttgatctgt

SEQ ID NO: 16474 - DNA, 17 bp, Gossypium hirsutum
atggacgtctaagagag

SEQ ID NO: 16475 - DNA, 17 bp, Gossypium hirsutum
atggacgtctaggagag

SEQ ID NO: 16476 - DNA, 31 bp, Gossypium hirsutum
tctcttcttctttgtctatgtcttttttcgt

SEQ ID NO: 16477 - DNA, 24 bp, Gossypium hirsutum
caatgtgaaagctgagggaaaagg

SEQ ID NO: 16478 - DNA, 14 bp, Gossypium hirsutum
ctggcctgaggatc

SEQ ID NO: 16479 - DNA, 14 bp, Gossypium hirsutum
ctggcctcaggatc

SEQ ID NO: 16480 - DNA, 26 bp, Gossypium hirsutum
gtaaaacggtaaaagcacacttcctt

SEQ ID NO: 16481 - DNA, 27 bp, Gossypium hirsutum
agatatttttcgaaatccgcaagcaaa

SEQ ID NO: 16482 - DNA, 17 bp, Gossypium hirsutum
ccttgaggcattagaca

SEQ ID NO: 16483 - DNA, 17 bp, Gossypium hirsutum
ccttgaggccttagaca

SEQ ID NO: 16484 - DNA, 31 bp, Gossypium hirsutum
gcagcagagaagataatcaaactgtaaaatt

SEQ ID NO: 16485 - DNA, 25 bp, Gossypium hirsutum
gcacttcaagttatcgagcagtcta

SEQ ID NO: 16486 - DNA, 15 bp, Gossypium hirsutum
ccgagatcgaaacca

SEQ ID NO: 16487 - DNA, 14 bp, Gossypium hirsutum
cgagatcaaaacca

SEQ ID NO: 16488 - DNA, 25 bp, Gossypium hirsutum
ggagttggtaagcatggatcatctt

SEQ ID NO: 16489 - DNA, 19 bp, Gossypium hirsutum
agcccttcgttgccaagag

SEQ ID NO: 16490 - DNA, 18 bp, Gossypium hirsutum
atgtatgtgagtaagtcc

SEQ ID NO: 16491 - DNA, 15 bp, Gossypium hirsutum
tatgtgagcaagtcc

SEQ ID NO: 16492 - DNA, 24 bp, Gossypium hirsutum
ccaaacttcaagtacgggcaaatt

SEQ ID NO: 16493 - DNA, 25 bp, Gossypium hirsutum
ctgagttcaactgcagaaagtgatc

SEQ ID NO: 16494 - DNA, 17 bp, Gossypium hirsutum
aagcactgacaacataa

SEQ ID NO: 16495 - DNA, 14 bp, Gossypium hirsutum
cactggcaacataa

SEQ ID NO: 16496 - DNA, 34 bp, Gossypium hirsutum
tcccaatcgtaacaatcttatgtaaatcttatgt

SEQ ID NO: 16497 - DNA, 27 bp, Gossypium hirsutum
tcaatcgggtctttctgttagcataac

SEQ ID NO: 16498 - DNA, 20 bp, Gossypium hirsutum
tagtcggatattacattaag

SEQ ID NO: 16499 - DNA, 21 bp, Gossypium hirsutum
ctagtcggatattacgttaag

SEQ ID NO: 16500 - DNA, 31 bp, Gossypium hirsutum
aggtccaaactaaccatacaacaatatgtac

SEQ ID NO: 16501 - DNA, 46 bp, Gossypium hirsutum
gtattatttatttatttattcacttttaactgtgagatttgaggtt

SEQ ID NO: 16502 - DNA, 20 bp, Gossypium hirsutum
tagtaaagagaataaaatca

SEQ ID NO: 16503 - DNA, 17 bp, Gossypium hirsutum
taaagagaagaaaatca

SEQ ID NO: 16504 - DNA, 27 bp, Gossypium hirsutum
cgacttgaagtcatatgaagcctacaa

SEQ ID NO: 16505 - DNA, 35 bp, Gossypium hirsutum
acaccaaatctcatattctacatactaagaactca

SEQ ID NO: 16506 - DNA, 22 bp, Gossypium hirsutum
ttgaaagaatctaaagaactaa

SEQ ID NO: 16507 - DNA, 21 bp, Gossypium hirsutum
tgaaagaatctaaaaaactaa

SEQ ID NO: 16508 - DNA, 26 bp, Gossypium hirsutum
gaagtcccctgaacaagaaatagagt

SEQ ID NO: 16509 - DNA, 22 bp, Gossypium hirsutum
ctgaagctttggtagtgagcga

SEQ ID NO: 16510 - DNA, 19 bp, Gossypium hirsutum
ctcttccatattgcttcat

SEQ ID NO: 16511 - DNA, 21 bp, Gossypium hirsutum
tactcttccatattccttcat

SEQ ID NO: 16512 - DNA, 27 bp, Gossypium hirsutum
ccaaacctcaaacttcttaacctccaa

SEQ ID NO: 16513 - DNA, 22 bp, Gossypium hirsutum
agagttgctcttcgcaatgaca

SEQ ID NO: 16514 - DNA, 18 bp, Gossypium hirsutum
atcagatgcaggacatag

SEQ ID NO: 16515 - DNA, 16 bp, Gossypium hirsutum
cagatgcaagacatag

SEQ ID NO: 16516 - DNA, 25 bp, Gossypium hirsutum
caagggatcaactttgcttggtaag

SEQ ID NO: 16517 - DNA, 42 bp, Gossypium hirsutum
tgctacagtaagtaatatttttcatttttatgacgtttattt

SEQ ID NO: 16518 - DNA, 18 bp, Gossypium hirsutum
cttcatttgtcattttat

SEQ ID NO: 16519 - DNA, 18 bp, Gossypium hirsutum
cttcatttgtgattttat

SEQ ID NO: 16520 - DNA, 25 bp, Gossypium hirsutum
ccaaggatccatctcaacaaaatgc

SEQ ID NO: 16521 - DNA, 40 bp, Gossypium hirsutum
ggaacccattgttgataaaaaaataaaatatttgaatcat

SEQ ID NO: 16522 - DNA, 23 bp, Gossypium hirsutum
aatacataaaaaaaaagaaaatt

SEQ ID NO: 16523 - DNA, 21 bp, Gossypium hirsutum
atacataaaaaaaagaaaatt

SEQ ID NO: 16524 - DNA, 27 bp, Gossypium hirsutum
gtcaacgaaaaggagaaacatcaagtt

SEQ ID NO: 16525 - DNA, 35 bp, Gossypium hirsutum
cgtacaaaatcaatatcccaaaatcattcaatcaa

SEQ ID NO: 16526 - DNA, 21 bp, Gossypium hirsutum
tatcactagaaaaacaacaat

SEQ ID NO: 16527 - DNA, 18 bp, Gossypium hirsutum
cactagaaaagcaacaat

SEQ ID NO: 16528 - DNA, 32 bp, Gossypium hirsutum
tggtaacaattcttcttttcttttcaagcttt

SEQ ID NO: 16529 - DNA, 31 bp, Gossypium hirsutum
aagatctactctgattttaaggtttcggaaa

SEQ ID NO: 16530 - DNA, 19 bp, Gossypium hirsutum
cagaaaactaacatgatcc

SEQ ID NO: 16531 - DNA, 19 bp, Gossypium hirsutum
cagaaaactaagatgatcc

SEQ ID NO: 16532 - DNA, 25 bp, Gossypium hirsutum
gcttctttgcctaggtatgcttcat

SEQ ID NO: 16533 - DNA, 35 bp, Gossypium hirsutum
ccatacctgacttcacctgaaatattaaatattcc

SEQ ID NO: 16534 - DNA, 23 bp, Gossypium hirsutum
atgttgcagaaattagtatgata

SEQ ID NO: 16535 - DNA, 22 bp, Gossypium hirsutum
tgttgcagaaattaatatgata

SEQ ID NO: 16536 - DNA, 45 bp, Gossypium hirsutum
ctcagatgttttaatttttatacgattttgtaatgctttatttta

SEQ ID NO: 16537 - DNA, 24 bp, Gossypium hirsutum
tgatcagcatcaactcctctttcc

SEQ ID NO: 16538 - DNA, 19 bp, Gossypium hirsutum
cattaacaacaagatgatg

SEQ ID NO: 16539 - DNA, 21 bp, Gossypium hirsutum
ttcattaacaacaatatgatg

SEQ ID NO: 16540 - DNA, 23 bp, Gossypium hirsutum
gcaggatgtacgtgaggatttgg

SEQ ID NO: 16541 - DNA, 18 bp, Gossypium hirsutum
gcgaggccaaggagctta

SEQ ID NO: 16542 - DNA, 19 bp, Gossypium hirsutum
actaatttgcaggtctatt

SEQ ID NO: 16543 - DNA, 20 bp, Gossypium hirsutum
cactaatttgcatgtctatt

SEQ ID NO: 16544 - DNA, 25 bp, Gossypium hirsutum
gtatctcgtcttcatcccttgttga

SEQ ID NO: 16545 - DNA, 32 bp, Gossypium hirsutum
ctctttgcaatttatttgcgaagattgtaaaa

SEQ ID NO: 16546 - DNA, 16 bp, Gossypium hirsutum
tggtttgagcaatgtg

SEQ ID NO: 16547 - DNA, 17 bp, Gossypium hirsutum
ttggtttgagcgatgtg

SEQ ID NO: 16548 - DNA, 26 bp, Gossypium hirsutum
gttgtacatggtgaccaaaagatgtt

SEQ ID NO: 16549 - DNA, 50 bp, Gossypium hirsutum
gagttaagttgtattttattcttcaattaaaaatgagtatattaagagtt

SEQ ID NO: 16550 - DNA, 26 bp, Gossypium hirsutum
ttcagatttttaaataaatagaataa

SEQ ID NO: 16551 - DNA, 24 bp, Gossypium hirsutum
cagatttttaaataagtagaataa

SEQ ID NO: 16552 - DNA, 25 bp, Gossypium hirsutum
tctctaaaccccgtaacacaacaaa

SEQ ID NO: 16553 - DNA, 26 bp, Gossypium hirsutum
ggtggagaaaaacaaaagtcacaaca

SEQ ID NO: 16554 - DNA, 20 bp, Gossypium hirsutum
tgttgtttctgtcttttcaa

SEQ ID NO: 16555 - DNA, 17 bp, Gossypium hirsutum
tgtttctgtcgtttcaa

SEQ ID NO: 16556 - DNA, 20 bp, Gossypium hirsutum
tgtttggccgtttggtctgt

SEQ ID NO: 16557 - DNA, 26 bp, Gossypium hirsutum
gcatttaaaaacctcaactactcgca

SEQ ID NO: 16558 - DNA, 22 bp, Gossypium hirsutum
caagtaacaatttagatcatca

SEQ ID NO: 16559 - DNA, 22 bp, Gossypium hirsutum
caagtaacaatttagttcatca

SEQ ID NO: 16560 - DNA, 25 bp, Gossypium hirsutum
gctcatgcatcagctgttctcatta

SEQ ID NO: 16561 - DNA, 28 bp, Gossypium hirsutum
ggatatgcattagacattggtacttcga

SEQ ID NO: 16562 - DNA, 19 bp, Gossypium hirsutum
ttggagcaatataatctaa

SEQ ID NO: 16563 - DNA, 19 bp, Gossypium hirsutum
ttggagcaatatagtctaa

SEQ ID NO: 16564 - DNA, 25 bp, Gossypium hirsutum
ggtcatcgtgaacctacatctgaaa

SEQ ID NO: 16565 - DNA, 30 bp, Gossypium hirsutum
cgttgtaactataaattgaatgtgctcctc

SEQ ID NO: 16566 - DNA, 19 bp, Gossypium hirsutum
aacacattcaatacacttc

SEQ ID NO: 16567 - DNA, 16 bp, Gossypium hirsutum
acattcgatacacttc

SEQ ID NO: 16568 - DNA, 21 bp, Gossypium hirsutum
acgtgatcagaatggcaacca

SEQ ID NO: 16569 - DNA, 20 bp, Gossypium hirsutum
gcacttcaagcctcggtaca

SEQ ID NO: 16570 - DNA, 17 bp, Gossypium hirsutum
catccatgctgatgatg

SEQ ID NO: 16571 - DNA, 16 bp, Gossypium hirsutum
atccatgctaatgatg

SEQ ID NO: 16572 - DNA, 23 bp, Gossypium hirsutum
cgacgcgtaaggtaaagattgag

SEQ ID NO: 16573 - DNA, 35 bp, Gossypium hirsutum
ggatgttcatgtagttgaatattattatgtttgca

SEQ ID NO: 16574 - DNA, 18 bp, Gossypium hirsutum
acatcaagtcctgattaa

SEQ ID NO: 16575 - DNA, 16 bp, Gossypium hirsutum
atcaagtccggattaa

SEQ ID NO: 16576 - DNA, 25 bp, Gossypium hirsutum
cggattgcacataaaacccagtagt

SEQ ID NO: 16577 - DNA, 25 bp, Gossypium hirsutum
aaccgtatggttgaggttttcagaa

SEQ ID NO: 16578 - DNA, 20 bp, Gossypium hirsutum
catttccctaaaacttgttc

SEQ ID NO: 16579 - DNA, 19 bp, Gossypium hirsutum
atttccctaaaatttgttc

SEQ ID NO: 16580 - DNA, 27 bp, Gossypium hirsutum
tgcacaataagttgaccaagttaagga

SEQ ID NO: 16581 - DNA, 29 bp, Gossypium hirsutum
gcatcaagactactttcatatgtccatgt

SEQ ID NO: 16582 - DNA, 20 bp, Gossypium hirsutum
ccatcataagtcaacacgac

SEQ ID NO: 16583 - DNA, 19 bp, Gossypium hirsutum
catcataagtcatcacgac

SEQ ID NO: 16584 - DNA, 28 bp, Gossypium hirsutum
tccaaggagctatatacaggaaagatgt

SEQ ID NO: 16585 - DNA, 33 bp, Gossypium hirsutum
cttgcaaacttgatcaaacattatctatttcct

SEQ ID NO: 16586 - DNA, 22 bp, Gossypium hirsutum
cattggtaattttttggcacaa

SEQ ID NO: 16587 - DNA, 22 bp, Gossypium hirsutum
cattggtaattttttgacacaa

SEQ ID NO: 16588 - DNA, 29 bp, Gossypium hirsutum
agttatccctcctctgatattccaaatct

SEQ ID NO: 16589 - DNA, 28 bp, Gossypium hirsutum
gttgtcagtagagtgatgatggatatgt

SEQ ID NO: 16590 - DNA, 17 bp, Gossypium hirsutum
cactgccattccactca

SEQ ID NO: 16591 - DNA, 16 bp, Gossypium hirsutum
actgccataccactca

SEQ ID NO: 16592 - DNA, 33 bp, Gossypium hirsutum
tggtgttagaataatgtatgagaaagatttgga

SEQ ID NO: 16593 - DNA, 25 bp, Gossypium hirsutum
aggaaagaggaagcctgatcaaatt

SEQ ID NO: 16594 - DNA, 18 bp, Gossypium hirsutum
ttcaggttttgctgtttc

SEQ ID NO: 16595 - DNA, 21 bp, Gossypium hirsutum
atattcaggtttttctgtttc

SEQ ID NO: 16596 - DNA, 41 bp, Gossypium hirsutum
acttgaaaatgtactattccatttgagttagaatatgttat

SEQ ID NO: 16597 - DNA, 25 bp, Gossypium hirsutum
cagctgtttgctctctttcatttgt

SEQ ID NO: 16598 - DNA, 20 bp, Gossypium hirsutum
ttatcaacttccatagattc

SEQ ID NO: 16599 - DNA, 16 bp, Gossypium hirsutum
caacttccgtagattc

SEQ ID NO: 16600 - DNA, 25 bp, Gossypium hirsutum
gatcggtgatggacataactatgct

SEQ ID NO: 16601 - DNA, 25 bp, Gossypium hirsutum
cgcttgcatctcaaacaataacgaa

SEQ ID NO: 16602 - DNA, 20 bp, Gossypium hirsutum
tccattacatgtagacctat

SEQ ID NO: 16603 - DNA, 19 bp, Gossypium hirsutum
ccattacatgttgacctat

SEQ ID NO: 16604 - DNA, 24 bp, Gossypium hirsutum
ccttcccggttttgcataaagaaa

SEQ ID NO: 16605 - DNA, 25 bp, Gossypium hirsutum
cgcataaatctgcaatggacttgat

SEQ ID NO: 16606 - DNA, 19 bp, Gossypium hirsutum
caagcatcttctcttccct

SEQ ID NO: 16607 - DNA, 18 bp, Gossypium hirsutum
aagcatcttctattccct

SEQ ID NO: 16608 - DNA, 25 bp, Gossypium hirsutum
cccagatcatccttccatgaaaaga

SEQ ID NO: 16609 - DNA, 23 bp, Gossypium hirsutum
ccccattatggcatctttgcaat

SEQ ID NO: 16610 - DNA, 15 bp, Gossypium hirsutum
cagtcaccgtatttt

SEQ ID NO: 16611 - DNA, 16 bp, Gossypium hirsutum
ccagtcaccctatttt

SEQ ID NO: 16612 - DNA, 29 bp, Gossypium hirsutum
catggaacaatcatactagctagcaagta

SEQ ID NO: 16613 - DNA, 20 bp, Gossypium hirsutum
gccttgcctcctgaaatgct

SEQ ID NO: 16614 - DNA, 23 bp, Gossypium hirsutum
tgcaaattaatttcatattaaaa

SEQ ID NO: 16615 - DNA, 21 bp, Gossypium hirsutum
caaattaatttcacattaaaa

SEQ ID NO: 16616 - DNA, 28 bp, Gossypium hirsutum
gcaacattttgttttctaattcggcttg

SEQ ID NO: 16617 - DNA, 27 bp, Gossypium hirsutum
ctggaagttcagacaagcttaattcct

SEQ ID NO: 16618 - DNA, 20 bp, Gossypium hirsutum
ccacaatgaaatagatacat

SEQ ID NO: 16619 - DNA, 20 bp, Gossypium hirsutum
ccacaatgaaatacatacat

SEQ ID NO: 16620 - DNA, 24 bp, Gossypium hirsutum
tctgaattagtccggtctgaagga

SEQ ID NO: 16621 - DNA, 15 bp, Gossypium hirsutum
ccggcccggtgtgtt

SEQ ID NO: 16622 - DNA, 19 bp, Gossypium hirsutum
acagaaagaataaaaggtg

SEQ ID NO: 16623 - DNA, 18 bp, Gossypium hirsutum
acagaaagaataaaggtg

SEQ ID NO: 16624 - DNA, 38 bp, Gossypium hirsutum
caatcacaatagagatgaacaaaataagtaaaacttgt

SEQ ID NO: 16625 - DNA, 26 bp, Gossypium hirsutum
gcagggacaaagtaataactccacta

SEQ ID NO: 16626 - DNA, 21 bp, Gossypium hirsutum
aaattgttaccaaaataagtc

SEQ ID NO: 16627 - DNA, 20 bp, Gossypium hirsutum
aattgttaccaaactaagtc

SEQ ID NO: 16628 - DNA, 28 bp, Gossypium hirsutum
gattggtgtttggaagaagagaaaactt

SEQ ID NO: 16629 - DNA, 29 bp, Gossypium hirsutum
aacacttggtgcgatttgttagattaaag

SEQ ID NO: 16630 - DNA, 20 bp, Gossypium hirsutum
tttcagtctcctttgttagc

SEQ ID NO: 16631 - DNA, 16 bp, Gossypium hirsutum
agtctccgttgttagc

SEQ ID NO: 16632 - DNA, 25 bp, Gossypium hirsutum
gcttactcttggtcacaccatatca

SEQ ID NO: 16633 - DNA, 19 bp, Gossypium hirsutum
ggaagacgagggcaaacct

SEQ ID NO: 16634 - DNA, 17 bp, Gossypium hirsutum
aatgcagaagtatctcc

SEQ ID NO: 16635 - DNA, 16 bp, Gossypium hirsutum
atgcagaactatctcc

SEQ ID NO: 16636 - DNA, 25 bp, Gossypium hirsutum
cgtgttttcctggttaattggttga

SEQ ID NO: 16637 - DNA, 29 bp, Gossypium hirsutum
gtacataacatagggctttaagtgagtgt

SEQ ID NO: 16638 - DNA, 21 bp, Gossypium hirsutum
actgcttcttttataatatat

SEQ ID NO: 16639 - DNA, 22 bp, Gossypium hirsutum
cactgcttcttttattatatat

SEQ ID NO: 16640 - DNA, 33 bp, Gossypium hirsutum
agaaatgaaataaacagaataaaaaaggccaca

SEQ ID NO: 16641 - DNA, 25 bp, Gossypium hirsutum
gttcctaggcttcatcttccttgtt

SEQ ID NO: 16642 - DNA, 23 bp, Gossypium hirsutum
ctttcaatctctattaacaaata

SEQ ID NO: 16643 - DNA, 19 bp, Gossypium hirsutum
caatctctattgacaaata

SEQ ID NO: 16644 - DNA, 28 bp, Gossypium hirsutum
cgacagaagatgacagtagaaactacaa

SEQ ID NO: 16645 - DNA, 31 bp, Gossypium hirsutum
cccatttacagcatatccatttattaaagca

SEQ ID NO: 16646 - DNA, 24 bp, Gossypium hirsutum
aaaagtttttgatgagatgctaga

SEQ ID NO: 16647 - DNA, 21 bp, Gossypium hirsutum
agtttttgatgagatgccaga

SEQ ID NO: 16648 - DNA, 28 bp, Gossypium hirsutum
gcaaaatgtggagagataaataaagcga

SEQ ID NO: 16649 - DNA, 22 bp, Gossypium hirsutum
gcagattcacaaccacgaagga

SEQ ID NO: 16650 - DNA, 16 bp, Gossypium hirsutum
cacgaaccacggtaag

SEQ ID NO: 16651 - DNA, 14 bp, Gossypium hirsutum
cgaaccgcggtaag

SEQ ID NO: 16652 - DNA, 34 bp, Gossypium hirsutum
tcaaaggtgcctcttttattttatttttcttcat

SEQ ID NO: 16653 - DNA, 24 bp, Gossypium hirsutum
gatagaatgggttctgtggctcat

SEQ ID NO: 16654 - DNA, 14 bp, Gossypium hirsutum
attggaggaaaatt

SEQ ID NO: 16655 - DNA, 13 bp, Gossypium hirsutum
ttggtggaaaatt

SEQ ID NO: 16656 - DNA, 22 bp, Gossypium hirsutum
tggactgcaagagaccacaaaa

SEQ ID NO: 16657 - DNA, 29 bp, Gossypium hirsutum
ctttctgcattgatttagttcctgtactt

SEQ ID NO: 16658 - DNA, 18 bp, Gossypium hirsutum
aatttggcctaaatagat

SEQ ID NO: 16659 - DNA, 16 bp, Gossypium hirsutum
atttggccaaatagat

SEQ ID NO: 16660 - DNA, 33 bp, Gossypium hirsutum
cggagaacattaactaaatttacaactttgtgt

SEQ ID NO: 16661 - DNA, 32 bp, Gossypium hirsutum
caaacaaacccagattaggtaattactagagt

SEQ ID NO: 16662 - DNA, 22 bp, Gossypium hirsutum
cattcaacaatctctaccccat

SEQ ID NO: 16663 - DNA, 18 bp, Gossypium hirsutum
caacaatctccaccccat

SEQ ID NO: 16664 - DNA, 26 bp, Gossypium hirsutum
gatcacaggtgaaattacagcagttt

SEQ ID NO: 16665 - DNA, 25 bp, Gossypium hirsutum
ccgatagcttaagtcacacgaaagt

SEQ ID NO: 16666 - DNA, 20 bp, Gossypium hirsutum
ttaagatcatgtgtgggatt

SEQ ID NO: 16667 - DNA, 21 bp, Gossypium hirsutum
cttaagatcatgtatgggatt

SEQ ID NO: 16668 - DNA, 25 bp, Gossypium hirsutum
ccagattttcaaagcgaagacaact

SEQ ID NO: 16669 - DNA, 32 bp, Gossypium hirsutum
agatgcatcctctgtgaaagtgataatatttt

SEQ ID NO: 16670 - DNA, 18 bp, Gossypium hirsutum
atttacccctcccactcc

SEQ ID NO: 16671 - DNA, 19 bp, Gossypium hirsutum
catttaccccttccactcc

SEQ ID NO: 16672 - DNA, 25 bp, Gossypium hirsutum
ccgctgacatttggtctaaggataa

SEQ ID NO: 16673 - DNA, 24 bp, Gossypium hirsutum
aggccaagacaaaaactacttcga

SEQ ID NO: 16674 - DNA, 17 bp, Gossypium hirsutum
tttggcttaggcgccgg

SEQ ID NO: 16675 - DNA, 17 bp, Gossypium hirsutum
tttggcttagccgccgg

SEQ ID NO: 16676 - DNA, 21 bp, Gossypium hirsutum
cacagaagccactgccttagt

SEQ ID NO: 16677 - DNA, 24 bp, Gossypium hirsutum
attcggcatctccaggtatgtttt

SEQ ID NO: 16678 - DNA, 22 bp, Gossypium hirsutum
accacaaattatctgtcaataa

SEQ ID NO: 16679 - DNA, 20 bp, Gossypium hirsutum
cacaaattatctgccaataa

SEQ ID NO: 16680 - DNA, 24 bp, Gossypium hirsutum
cataagcttcacacctagggttct

SEQ ID NO: 16681 - DNA, 25 bp, Gossypium hirsutum
ctttcagcttaagtacctgggaagt

SEQ ID NO: 16682 - DNA, 19 bp, Gossypium hirsutum
ccaagtactgttttttgac

SEQ ID NO: 16683 - DNA, 18 bp, Gossypium hirsutum
caagtactgttgtttgac

SEQ ID NO: 16684 - DNA, 23 bp, Gossypium hirsutum
gacactcgtatccgacaaatgga

SEQ ID NO: 16685 - DNA, 19 bp, Gossypium hirsutum
gggtggacgtcttgttgca

SEQ ID NO: 16686 - DNA, 16 bp, Gossypium hirsutum
cactcaaggctttaac

SEQ ID NO: 16687 - DNA, 16 bp, Gossypium hirsutum
cactcaagactttaac

SEQ ID NO: 16688 - DNA, 28 bp, Gossypium hirsutum
acttcgttaatgaattcctctccatctt

SEQ ID NO: 16689 - DNA, 28 bp, Gossypium hirsutum
tttcctctctacccaatcgaacaatttt

SEQ ID NO: 16690 - DNA, 20 bp, Gossypium hirsutum
aaaattttcgaagccaggcc

SEQ ID NO: 16691 - DNA, 17 bp, Gossypium hirsutum
attttcgaagccgggcc

SEQ ID NO: 16692 - DNA, 31 bp, Gossypium hirsutum
gatggaagttttaggcacaatgattaattca

SEQ ID NO: 16693 - DNA, 24 bp, Gossypium hirsutum
ccgactgccggataatacaacatt

SEQ ID NO: 16694 - DNA, 16 bp, Gossypium hirsutum
cccaaacatgagattc

SEQ ID NO: 16695 - DNA, 16 bp, Gossypium hirsutum
cccaaagatgagattc

SEQ ID NO: 16696 - DNA, 25 bp, Gossypium hirsutum
cactgcaacaccctttaagctttat

SEQ ID NO: 16697 - DNA, 40 bp, Gossypium hirsutum
gtgttacagatttaaggttagtttactttacttaactact

SEQ ID NO: 16698 - DNA, 26 bp, Gossypium hirsutum
attccattaaatcttttattttatag

SEQ ID NO: 16699 - DNA, 26 bp, Gossypium hirsutum
attccattaaatcttttattttacag

SEQ ID NO: 16700 - DNA, 26 bp, Gossypium hirsutum
aaaaagcacccttgatttcaaaagct

SEQ ID NO: 16701 - DNA, 22 bp, Gossypium hirsutum
gttggctttggaacaccatgtc

SEQ ID NO: 16702 - DNA, 19 bp, Gossypium hirsutum
taaggttgaagttgatcct

SEQ ID NO: 16703 - DNA, 18 bp, Gossypium hirsutum
aaggttgaacttgatcct

SEQ ID NO: 16704 - DNA, 15 bp, Gossypium hirsutum
atggccaggctcgca

SEQ ID NO: 16705 - DNA, 22 bp, Gossypium hirsutum
ccaagatactggctgggaagag

SEQ ID NO: 16706 - DNA, 20 bp, Gossypium hirsutum
ctattattaggcaagattaa

SEQ ID NO: 16707 - DNA, 17 bp, Gossypium hirsutum
ttattaggcgagattaa

SEQ ID NO: 16708 - DNA, 22 bp, Gossypium hirsutum
gtctggccatggattagccttt

SEQ ID NO: 16709 - DNA, 41 bp, Gossypium hirsutum
tgagaaaggttaatatatcttatttatgtcatatgcatgtg

SEQ ID NO: 16710 - DNA, 21 bp, Gossypium hirsutum
aaaattaccttcaaaaacatt

SEQ ID NO: 16711 - DNA, 18 bp, Gossypium hirsutum
attaccttcagaaacatt

SEQ ID NO: 16712 - DNA, 22 bp, Gossypium hirsutum
tggacgggaacactttcaatgt

SEQ ID NO: 16713 - DNA, 23 bp, Gossypium hirsutum
ggcacacttgtcaaccaagatag

SEQ ID NO: 16714 - DNA, 16 bp, Gossypium hirsutum
ctatgtgccgatgatc

SEQ ID NO: 16715 - DNA, 15 bp, Gossypium hirsutum
tatgtgccaatgatc

SEQ ID NO: 16716 - DNA, 25 bp, Gossypium hirsutum
agccatggtcttgaaactggaaata

SEQ ID NO: 16717 - DNA, 25 bp, Gossypium hirsutum
cttcaccaaaacgtcaactcatctt

SEQ ID NO: 16718 - DNA, 15 bp, Gossypium hirsutum
cagagtgcggtgcta

SEQ ID NO: 16719 - DNA, 15 bp, Gossypium hirsutum
cagagtgcagtgcta

SEQ ID NO: 16720 - DNA, 28 bp, Gossypium hirsutum
ccaaatgggttgttctatttcaatggat

SEQ ID NO: 16721 - DNA, 28 bp, Gossypium hirsutum
cacactagtgacagaaacatatccgtat

SEQ ID NO: 16722 - DNA, 18 bp, Gossypium hirsutum
caactctcctgtaggatt

SEQ ID NO: 16723 - DNA, 19 bp, Gossypium hirsutum
ccaactctcctataggatt

SEQ ID NO: 16724 - DNA, 25 bp, Gossypium hirsutum
gatgaagctcgtggatacaggtaaa

SEQ ID NO: 16725 - DNA, 26 bp, Gossypium hirsutum
cgagcagcttcttccaatatatctct

SEQ ID NO: 16726 - DNA, 16 bp, Gossypium hirsutum
ttccctgacgtgcgtc

SEQ ID NO: 16727 - DNA, 17 bp, Gossypium hirsutum
attccctgatgtgcgtc

SEQ ID NO: 16728 - DNA, 24 bp, Gossypium hirsutum
agagggaagctccaacttatacct

SEQ ID NO: 16729 - DNA, 30 bp, Gossypium hirsutum
ctgaaacttacctcctaagattatgcattg

SEQ ID NO: 16730 - DNA, 19 bp, Gossypium hirsutum
aaactcaacaggttagaag

SEQ ID NO: 16731 - DNA, 19 bp, Gossypium hirsutum
aaactcaacagattagaag

SEQ ID NO: 16732 - DNA, 25 bp, Gossypium hirsutum
actcgaaaaattggtccacgctata

SEQ ID NO: 16733 - DNA, 26 bp, Gossypium hirsutum
gttcaaagttgtggttaagtgagctt

SEQ ID NO: 16734 - DNA, 17 bp, Gossypium hirsutum
caagtcgtcaggatcaa

SEQ ID NO: 16735 - DNA, 16 bp, Gossypium hirsutum
aagtcgtcagcatcaa

SEQ ID NO: 16736 - DNA, 23 bp, Gossypium hirsutum
cgcttcaggaccaaactcttcaa

SEQ ID NO: 16737 - DNA, 23 bp, Gossypium hirsutum
caaggatgcttccagtcttttcc

SEQ ID NO: 16738 - DNA, 18 bp, Gossypium hirsutum
ctgctcctgtttacaaag

SEQ ID NO: 16739 - DNA, 15 bp, Gossypium hirsutum
ctcctgttaacaaag

SEQ ID NO: 16740 - DNA, 23 bp, Gossypium hirsutum
gaagcagatgaacgcaattgtct

SEQ ID NO: 16741 - DNA, 29 bp, Gossypium hirsutum
acgtcaagaacaaagtgaaagttgtacta

SEQ ID NO: 16742 - DNA, 16 bp, Gossypium hirsutum
ctcagggctgctagat

SEQ ID NO: 16743 - DNA, 14 bp, Gossypium hirsutum
cagggccgctagat

SEQ ID NO: 16744 - DNA, 30 bp, Gossypium hirsutum
gagtttaaagccaaaagcaataggaaatca

SEQ ID NO: 16745 - DNA, 25 bp, Gossypium hirsutum
cagccgtttgtggaaatgttaagaa

SEQ ID NO: 16746 - DNA, 21 bp, Gossypium hirsutum
ctaagttatatagccatttct

SEQ ID NO: 16747 - DNA, 19 bp, Gossypium hirsutum
aagttatatagcgatttct

SEQ ID NO: 16748 - DNA, 24 bp, Gossypium hirsutum
agcttctgccaaagagttacactt

SEQ ID NO: 16749 - DNA, 25 bp, Gossypium hirsutum
ctttgctgccatctgtaaatttcct

SEQ ID NO: 16750 - DNA, 21 bp, Gossypium hirsutum
ttctgtcaaatgataacttaa

SEQ ID NO: 16751 - DNA, 19 bp, Gossypium hirsutum
ctgtcaaatgatcacttaa

SEQ ID NO: 16752 - DNA, 25 bp, Gossypium hirsutum
gttgctacatgttcttgctattgca

SEQ ID NO: 16753 - DNA, 18 bp, Gossypium hirsutum
tcgcacgcgaagaggaaa

SEQ ID NO: 16754 - DNA, 16 bp, Gossypium hirsutum
acggtcttgcttactt

SEQ ID NO: 16755 - DNA, 15 bp, Gossypium hirsutum
cggtcttgcatactt

SEQ ID NO: 16756 - DNA, 46 bp, Gossypium hirsutum
ttccccttaatttttatacgggtttattatctaatcttataatatc

SEQ ID NO: 16757 - DNA, 33 bp, Gossypium hirsutum
gtaggactacaaagtatgtatgagagacatttt

SEQ ID NO: 16758 - DNA, 19 bp, Gossypium hirsutum
aacataagtagcgacaacc

SEQ ID NO: 16759 - DNA, 17 bp, Gossypium hirsutum
cataagtagcaacaacc

SEQ ID NO: 16760 - DNA, 23 bp, Gossypium hirsutum
ggccagaaaggtatcagccaata

SEQ ID NO: 16761 - DNA, 23 bp, Gossypium hirsutum
aaaacttgcaggagtctgcttct

SEQ ID NO: 16762 - DNA, 20 bp, Gossypium hirsutum
tgatgttagcacttaacaga

SEQ ID NO: 16763 - DNA, 18 bp, Gossypium hirsutum
atgttagcacttaaaaga

SEQ ID NO: 16764 - DNA, 25 bp, Gossypium hirsutum
cctcccttccacctcaataaaagat

SEQ ID NO: 16765 - DNA, 40 bp, Gossypium hirsutum
caagaggagaaaaaaaaatgagagatatataaatcaagtg

SEQ ID NO: 16766 - DNA, 15 bp, Gossypium hirsutum
cctgcctaatacaac

SEQ ID NO: 16767 - DNA, 15 bp, Gossypium hirsutum
cctgcctattacaac

SEQ ID NO: 16768 - DNA, 26 bp, Gossypium hirsutum
tggcaagttgaaaactgagagaaaga

SEQ ID NO: 16769 - DNA, 25 bp, Gossypium hirsutum
cactgctaatcccatccttagtcaa

SEQ ID NO: 16770 - DNA, 20 bp, Gossypium hirsutum
ctttcttttgctataaataa

SEQ ID NO: 16771 - DNA, 17 bp, Gossypium hirsutum
tcttttgctgtaaataa

SEQ ID NO: 16772 - DNA, 28 bp, Gossypium hirsutum
ggatgtagagtgtaaccgttaaaatggt

SEQ ID NO: 16773 - DNA, 31 bp, Gossypium hirsutum
caaaagtagtaaaatgccttggtttcaatct

SEQ ID NO: 16774 - DNA, 24 bp, Gossypium hirsutum
tctatgacttattatagagactaa

SEQ ID NO: 16775 - DNA, 23 bp, Gossypium hirsutum
ctatgacttattatacagactaa

SEQ ID NO: 16776 - DNA, 27 bp, Gossypium hirsutum
atgcctgttaaattgtacaacgtgttt

SEQ ID NO: 16777 - DNA, 25 bp, Gossypium hirsutum
ggcaaaaagacaaaagctagatgca

SEQ ID NO: 16778 - DNA, 18 bp, Gossypium hirsutum
atcagaacttgcttttgg

SEQ ID NO: 16779 - DNA, 18 bp, Gossypium hirsutum
atcagaacttacttttgg

SEQ ID NO: 16780 - DNA, 25 bp, Gossypium hirsutum
acgtctctgctgatgatgattttct

SEQ ID NO: 16781 - DNA, 28 bp, Gossypium hirsutum
gaaaaccacaagaatttattccccatgt

SEQ ID NO: 16782 - DNA, 24 bp, Gossypium hirsutum
ttcattatcaattaagctgtcacc

SEQ ID NO: 16783 - DNA, 24 bp, Gossypium hirsutum
ttcattatcaattaagttgtcacc

SEQ ID NO: 16784 - DNA, 24 bp, Gossypium hirsutum
ccattgtcttcttccactcttcct

SEQ ID NO: 16785 - DNA, 26 bp, Gossypium hirsutum
tgacagacacttgagaagagaagtca

SEQ ID NO: 16786 - DNA, 15 bp, Gossypium hirsutum
ctgcagcttcaaagc

SEQ ID NO: 16787 - DNA, 16 bp, Gossypium hirsutum
tctgcagtttcaaagc

SEQ ID NO: 16788 - DNA, 25 bp, Gossypium hirsutum
cccacttgtccgtttctaaatgttt

SEQ ID NO: 16789 - DNA, 24 bp, Gossypium hirsutum
ggatgccatgtgattctctttgtg

SEQ ID NO: 16790 - DNA, 17 bp, Gossypium hirsutum
catgcataggactactt

SEQ ID NO: 16791 - DNA, 18 bp, Gossypium hirsutum
acatgcataggtctactt

SEQ ID NO: 16792 - DNA, 25 bp, Gossypium hirsutum
cgtctgataatgcgtttacagcaaa

SEQ ID NO: 16793 - DNA, 27 bp, Gossypium hirsutum
gtgacatttcttgctgatctttttgga

SEQ ID NO: 16794 - DNA, 20 bp, Gossypium hirsutum
actccaatattagtaaaggt

SEQ ID NO: 16795 - DNA, 20 bp, Gossypium hirsutum
actccaatattactaaaggt

SEQ ID NO: 16796 - DNA, 26 bp, Gossypium hirsutum
gaactcacaattttcaaacccaagga

SEQ ID NO: 16797 - DNA, 31 bp, Gossypium hirsutum
ctcttggatgaaagcttaatgctaaaatgtt

SEQ ID NO: 16798 - DNA, 20 bp, Gossypium hirsutum
atagttacacacgtaagatg

SEQ ID NO: 16799 - DNA, 18 bp, Gossypium hirsutum
agttacacaggtaagatg

SEQ ID NO: 16800 - DNA, 30 bp, Gossypium hirsutum
acctattagatgtgagctaagttaactcga

SEQ ID NO: 16801 - DNA, 25 bp, Gossypium hirsutum
cattcccactcctacctttgtctaa

SEQ ID NO: 16802 - DNA, 18 bp, Gossypium hirsutum
atcccaaccactagaata

SEQ ID NO: 16803 - DNA, 18 bp, Gossypium hirsutum
atcccaaccattagaata

SEQ ID NO: 16804 - DNA, 23 bp, Gossypium hirsutum
gtgcctcgcccctaattagttta

SEQ ID NO: 16805 - DNA, 26 bp, Gossypium hirsutum
caacgaacgatcataggttagatcca

SEQ ID NO: 16806 - DNA, 15 bp, Gossypium hirsutum
aaagacggcagcctt

SEQ ID NO: 16807 - DNA, 16 bp, Gossypium hirsutum
caaagactgcagcctt

SEQ ID NO: 16808 - DNA, 23 bp, Gossypium hirsutum
ggcttcagtcagagtaccagatc

SEQ ID NO: 16809 - DNA, 26 bp, Gossypium hirsutum
caaggccagtaaaatgctcaaattct

SEQ ID NO: 16810 - DNA, 19 bp, Gossypium hirsutum
ctctaatttgccacagcgt

SEQ ID NO: 16811 - DNA, 22 bp, Gossypium hirsutum
aaactctaatttaccacagcgt

SEQ ID NO: 16812 - DNA, 24 bp, Gossypium hirsutum
ccattaccgtccctgtaagttctg

SEQ ID NO: 16813 - DNA, 27 bp, Gossypium hirsutum
ctgccttacaacaaggaatcaaatagg

SEQ ID NO: 16814 - DNA, 20 bp, Gossypium hirsutum
ccaacattatctgtgtttac

SEQ ID NO: 16815 - DNA, 18 bp, Gossypium hirsutum
aacattatctgggtttac

SEQ ID NO: 16816 - DNA, 25 bp, Gossypium hirsutum
gacagtgagagcaggtgttttatct

SEQ ID NO: 16817 - DNA, 27 bp, Gossypium hirsutum
gtggtaaaaaatgagctcaacagctaa

SEQ ID NO: 16818 - DNA, 20 bp, Gossypium hirsutum
caaattctttttcaaagttg

SEQ ID NO: 16819 - DNA, 20 bp, Gossypium hirsutum
caaattctttttcgaagttg

SEQ ID NO: 16820 - DNA, 44 bp, Gossypium hirsutum
agattaatagtgtaatcttcttttttgaaataatagtgtaacct

SEQ ID NO: 16821 - DNA, 28 bp, Gossypium hirsutum
tccaattgataactaagcgaacctaagg

SEQ ID NO: 16822 - DNA, 21 bp, Gossypium hirsutum
ctattacagtagggaatatat

SEQ ID NO: 16823 - DNA, 16 bp, Gossypium hirsutum
acagtagggcatatat

SEQ ID NO: 16824 - DNA, 26 bp, Gossypium hirsutum
tgagatatgtgccatttggacagaag

SEQ ID NO: 16825 - DNA, 22 bp, Gossypium hirsutum
ctgatctcactcactgccgtta

SEQ ID NO: 16826 - DNA, 18 bp, Gossypium hirsutum
catttgtggtattgaatg

SEQ ID NO: 16827 - DNA, 17 bp, Gossypium hirsutum
atttgtggtgttgaatg

SEQ ID NO: 16828 - DNA, 20 bp, Gossypium hirsutum
ggcggctgtaagttggtact

SEQ ID NO: 16829 - DNA, 23 bp, Gossypium hirsutum
gtttgccaatatcagctgccatg

SEQ ID NO: 16830 - DNA, 20 bp, Gossypium hirsutum
tttgaggattctcatgaatt

SEQ ID NO: 16831 - DNA, 18 bp, Gossypium hirsutum
tgaggattctcgtgaatt

SEQ ID NO: 16832 - DNA, 28 bp, Gossypium hirsutum
ttgttcccaaactttaccaattccctat

SEQ ID NO: 16833 - DNA, 25 bp, Gossypium hirsutum
gcatgtgaagactgtcaccagataa

SEQ ID NO: 16834 - DNA, 17 bp, Gossypium hirsutum
accctctttgttttatc

SEQ ID NO: 16835 - DNA, 18 bp, Gossypium hirsutum
aaccctctttattttatc

SEQ ID NO: 16836 - DNA, 25 bp, Gossypium hirsutum
gtatttgggttgggagtggaattct

SEQ ID NO: 16837 - DNA, 27 bp, Gossypium hirsutum
caatgacaatttctcttgaggatggtt

SEQ ID NO: 16838 - DNA, 19 bp, Gossypium hirsutum
ctttttagggcatattcta

SEQ ID NO: 16839 - DNA, 15 bp, Gossypium hirsutum
ttagggcaaattcta

SEQ ID NO: 16840 - DNA, 24 bp, Gossypium hirsutum
gctcctatttcttccatccgatgc

SEQ ID NO: 16841 - DNA, 25 bp, Gossypium hirsutum
acccgacactagctaaacaaatgaa

SEQ ID NO: 16842 - DNA, 21 bp, Gossypium hirsutum
atcaagtcattctactaaaat

SEQ ID NO: 16843 - DNA, 19 bp, Gossypium hirsutum
caagtcattctcctaaaat

SEQ ID NO: 16844 - DNA, 28 bp, Gossypium hirsutum
cagtaagtaaatgcatattggcaccttt

SEQ ID NO: 16845 - DNA, 22 bp, Gossypium hirsutum
tcgttgaagggcttaacaagca

SEQ ID NO: 16846 - DNA, 18 bp, Gossypium hirsutum
aaatgaatgtgccaatgc

SEQ ID NO: 16847 - DNA, 19 bp, Gossypium hirsutum
aaaatgaatgtaccaatgc

SEQ ID NO: 16848 - DNA, 20 bp, Gossypium hirsutum
gcccgctcttgtttctcaca

SEQ ID NO: 16849 - DNA, 17 bp, Gossypium hirsutum
gccactcctgcgtcact

SEQ ID NO: 16850 - DNA, 21 bp, Gossypium hirsutum
aaactttaagtaacgaataat

SEQ ID NO: 16851 - DNA, 21 bp, Gossypium hirsutum
aaactttaagtaatgaataat

SEQ ID NO: 16852 - DNA, 38 bp, Gossypium hirsutum
tggtaatgcattcttaaattttactcattttcttttct

SEQ ID NO: 16853 - DNA, 26 bp, Gossypium hirsutum
caagttgaagctttgctatcgacatt

SEQ ID NO: 16854 - DNA, 17 bp, Gossypium hirsutum
cccttttgatctttttg

SEQ ID NO: 16855 - DNA, 16 bp, Gossypium hirsutum
ccttttgacctttttg

SEQ ID NO: 16856 - DNA, 24 bp, Gossypium hirsutum
acggattcagactctgtcccatat

SEQ ID NO: 16857 - DNA, 27 bp, Gossypium hirsutum
cttggaagaaaaacacaacatctcact

SEQ ID NO: 16858 - DNA, 24 bp, Gossypium hirsutum
ctaaagaaattaaaaataaaggtg

SEQ ID NO: 16859 - DNA, 22 bp, Gossypium hirsutum
aaagaaattaaaagtaaaggtg

SEQ ID NO: 16860 - DNA, 30 bp, Gossypium hirsutum
gcagtagaaaaacttcttgattatcagcaa

SEQ ID NO: 16861 - DNA, 25 bp, Gossypium hirsutum
gcaagaacatgtagcaacaggtcta

SEQ ID NO: 16862 - DNA, 17 bp, Gossypium hirsutum
atgtcgaccacataagt

SEQ ID NO: 16863 - DNA, 14 bp, Gossypium hirsutum
tcgaccgcataagt

SEQ ID NO: 16864 - DNA, 26 bp, Gossypium hirsutum
accctggtagtgaaaatactgactct

SEQ ID NO: 16865 - DNA, 29 bp, Gossypium hirsutum
gggaattcgttatctggtttagtttgttc

SEQ ID NO: 16866 - DNA, 16 bp, Gossypium hirsutum
ctttcaccccaactat

SEQ ID NO: 16867 - DNA, 16 bp, Gossypium hirsutum
ctttcaccacaactat

SEQ ID NO: 16868 - DNA, 22 bp, Gossypium hirsutum
ggtgattgctgttcccatgttc

SEQ ID NO: 16869 - DNA, 24 bp, Gossypium hirsutum
gtcaagtcagttgcctagatggat

SEQ ID NO: 16870 - DNA, 18 bp, Gossypium hirsutum
cacaagcaatacggatca

SEQ ID NO: 16871 - DNA, 17 bp, Gossypium hirsutum
acaagcaattcggatca

SEQ ID NO: 16872 - DNA, 27 bp, Gossypium hirsutum
tcagcctgctataatgtcctattggta

SEQ ID NO: 16873 - DNA, 25 bp, Gossypium hirsutum
gcaagagagtccattcgatgatgta

SEQ ID NO: 16874 - DNA, 18 bp, Gossypium hirsutum
cagcatacaaaatatcca

SEQ ID NO: 16875 - DNA, 19 bp, Gossypium hirsutum
tcagcatacaatatatcca

SEQ ID NO: 16876 - DNA, 21 bp, Gossypium hirsutum
tcttcgcaggctgttgagatc

SEQ ID NO: 16877 - DNA, 23 bp, Gossypium hirsutum
cccctgccttttggcagattata

SEQ ID NO: 16878 - DNA, 14 bp, Gossypium hirsutum
ttgtggccaaatta

SEQ ID NO: 16879 - DNA, 17 bp, Gossypium hirsutum
ttgttgtggcctaatta

SEQ ID NO: 16880 - DNA, 29 bp, Gossypium hirsutum
tgacatcttcttggtaatgaagaatgctt

SEQ ID NO: 16881 - DNA, 26 bp, Gossypium hirsutum
gccagcaaatgtcaagatagatgagt

SEQ ID NO: 16882 - DNA, 17 bp, Gossypium hirsutum
caacgcaaacctcaaat

SEQ ID NO: 16883 - DNA, 17 bp, Gossypium hirsutum
caacgcaaaactcaaat

SEQ ID NO: 16884 - DNA, 31 bp, Gossypium hirsutum
aatcctccacttaaataccttcaatagcttt

SEQ ID NO: 16885 - DNA, 35 bp, Gossypium hirsutum
ctgcatactttttctttatgactttatgtgattga

SEQ ID NO: 16886 - DNA, 22 bp, Gossypium hirsutum
agactcttttaaaacaattata

SEQ ID NO: 16887 - DNA, 22 bp, Gossypium hirsutum
agactcttttaaaaaaattata

SEQ ID NO: 16888 - DNA, 26 bp, Gossypium hirsutum
gatcgcattcaaatacgagtccaaag

SEQ ID NO: 16889 - DNA, 25 bp, Gossypium hirsutum
ctggctattatttggtggcctctaa

SEQ ID NO: 16890 - DNA, 16 bp, Gossypium hirsutum
caaactccaacatttg

SEQ ID NO: 16891 - DNA, 15 bp, Gossypium hirsutum
aaactccagcatttg

SEQ ID NO: 16892 - DNA, 23 bp, Gossypium hirsutum
ggaagaccaactacaccttagct

SEQ ID NO: 16893 - DNA, 24 bp, Gossypium hirsutum
gtcgcttcgttgataaaggttgag

SEQ ID NO: 16894 - DNA, 17 bp, Gossypium hirsutum
caaactcgacgcatcaa

SEQ ID NO: 16895 - DNA, 16 bp, Gossypium hirsutum
aaactcgacacatcaa

SEQ ID NO: 16896 - DNA, 41 bp, Gossypium hirsutum
acttaagtctaaaataatctaaagaaaaaactacacatggt

SEQ ID NO: 16897 - DNA, 26 bp, Gossypium hirsutum
acagaaggaagaaccatttcgaaagt

SEQ ID NO: 16898 - DNA, 19 bp, Gossypium hirsutum
ttggtaggaagttaacaag

SEQ ID NO: 16899 - DNA, 19 bp, Gossypium hirsutum
ttggtaggaagttgacaag

SEQ ID NO: 16900 - DNA, 25 bp, Gossypium hirsutum
gtagccaaaggagttcaaaaaacca

SEQ ID NO: 16901 - DNA, 24 bp, Gossypium hirsutum
ccaatcctctcctctcactttctt

SEQ ID NO: 16902 - DNA, 14 bp, Gossypium hirsutum
cacctgaaaagacg

SEQ ID NO: 16903 - DNA, 13 bp, Gossypium hirsutum
cacctgaaagacg

SEQ ID NO: 16904 - DNA, 25 bp, Gossypium hirsutum
gtaacctcaatgctctggaaacact

SEQ ID NO: 16905 - DNA, 29 bp, Gossypium hirsutum
gcctaaacatcaattcatttaacctcagt

SEQ ID NO: 16906 - DNA, 20 bp, Gossypium hirsutum
cttatattgagttaaaattt

SEQ ID NO: 16907 - DNA, 20 bp, Gossypium hirsutum
cttatattcagttaaaattt

SEQ ID NO: 16908 - DNA, 32 bp, Gossypium hirsutum
gagggtgtatttgggtacaataaaagtatagg

SEQ ID NO: 16909 - DNA, 24 bp, Gossypium hirsutum
gagtgaagaaacgagttccttgtg

SEQ ID NO: 16910 - DNA, 23 bp, Gossypium hirsutum
agaaataaaacatttacaattga

SEQ ID NO: 16911 - DNA, 20 bp, Gossypium hirsutum
aataaaacattgacaattga

SEQ ID NO: 16912 - DNA, 29 bp, Gossypium hirsutum
atggtgtgatattcctttcagtcatttga

SEQ ID NO: 16913 - DNA, 33 bp, Gossypium hirsutum
ccgaaaatacatggaaaaaatgagacattagta

SEQ ID NO: 16914 - DNA, 21 bp, Gossypium hirsutum
tcaataattgaaactaaatac

SEQ ID NO: 16915 - DNA, 19 bp, Gossypium hirsutum
aataattgaagctaaatac

SEQ ID NO: 16916 - DNA, 34 bp, Gossypium hirsutum
attaactgaaattccttttcccatcaaatgattt

SEQ ID NO: 16917 - DNA, 30 bp, Gossypium hirsutum
actttcatatctgaatcttcaccacattgt

SEQ ID NO: 16918 - DNA, 19 bp, Gossypium hirsutum
caattaacttgaattcgtg

SEQ ID NO: 16919 - DNA, 19 bp, Gossypium hirsutum
caattaacttgacttcgtg

SEQ ID NO: 16920 - DNA, 22 bp, Gossypium hirsutum
cctcaggcggaactcataactg

SEQ ID NO: 16921 - DNA, 34 bp, Gossypium hirsutum
tgtcaaagaattacgtaggtttttataggaaact

SEQ ID NO: 16922 - DNA, 24 bp, Gossypium hirsutum
ttttattttaaaactcaaagtttt

SEQ ID NO: 16923 - DNA, 23 bp, Gossypium hirsutum
ttttattttaaaactcaagtttt

SEQ ID NO: 16924 - DNA, 35 bp, Gossypium hirsutum
tgctttaatcgcttgttgttaatttaattaactga

SEQ ID NO: 16925 - DNA, 23 bp, Gossypium hirsutum
cacgccatctttgttgacaatga

SEQ ID NO: 16926 - DNA, 18 bp, Gossypium hirsutum
actgcttgaaacctcaat

SEQ ID NO: 16927 - DNA, 17 bp, Gossypium hirsutum
ctgcttgaaagctcaat

SEQ ID NO: 16928 - DNA, 34 bp, Gossypium hirsutum
tgaacggaaatgatattcaaaacgaatgattatg

SEQ ID NO: 16929 - DNA, 25 bp, Gossypium hirsutum
cagggtctactcttttcaaggtaca

SEQ ID NO: 16930 - DNA, 21 bp, Gossypium hirsutum
acacacttttatgtttctttt

SEQ ID NO: 16931 - DNA, 19 bp, Gossypium hirsutum
acacttttatggttctttt

SEQ ID NO: 16932 - DNA, 25 bp, Gossypium hirsutum
cccttcctccaattggtaacctatt

SEQ ID NO: 16933 - DNA, 26 bp, Gossypium hirsutum
tggtttatttgcaagggaagtttcct

SEQ ID NO: 16934 - DNA, 18 bp, Gossypium hirsutum
aatccatgctagacaaaa

SEQ ID NO: 16935 - DNA, 18 bp, Gossypium hirsutum
aatccatgctagtcaaaa

SEQ ID NO: 16936 - DNA, 25 bp, Gossypium hirsutum
ccaaagatttcaatgtcacctgctt

SEQ ID NO: 16937 - DNA, 25 bp, Gossypium hirsutum
gccattcatgtcctcagagattgtt

SEQ ID NO: 16938 - DNA, 17 bp, Gossypium hirsutum
tttggttgaaaattgtc

SEQ ID NO: 16939 - DNA, 16 bp, Gossypium hirsutum
ttggttgaacattgtc

SEQ ID NO: 16940 - DNA, 27 bp, Gossypium hirsutum
gctttaagttttcttccacccattcaa

SEQ ID NO: 16941 - DNA, 25 bp, Gossypium hirsutum
aaaagttccagaaaccaaaggcatg

SEQ ID NO: 16942 - DNA, 16 bp, Gossypium hirsutum
cctcttgaaatcatca

SEQ ID NO: 16943 - DNA, 16 bp, Gossypium hirsutum
cctcttgaagtcatca

SEQ ID NO: 16944 - DNA, 22 bp, Gossypium hirsutum
cctgctttgatccaacggaaaa

SEQ ID NO: 16945 - DNA, 26 bp, Gossypium hirsutum
gagagtgagagagaagaacaaaaggg

SEQ ID NO: 16946 - DNA, 18 bp, Gossypium hirsutum
cttatcacaagcagcagc

SEQ ID NO: 16947 - DNA, 17 bp, Gossypium hirsutum
ttatcacaagaagcagc

SEQ ID NO: 16948 - DNA, 22 bp, Gossypium hirsutum
cctgtcaacaatgggacacact

SEQ ID NO: 16949 - DNA, 30 bp, Gossypium hirsutum
gctccataatttctttaactggaaaacacc

SEQ ID NO: 16950 - DNA, 17 bp, Gossypium hirsutum
atcctcctatggtcttc

SEQ ID NO: 16951 - DNA, 17 bp, Gossypium hirsutum
atcctcctatagtcttc

SEQ ID NO: 16952 - DNA, 25 bp, Gossypium hirsutum
ccaccatttacctctcccaaaacta

SEQ ID NO: 16953 - DNA, 19 bp, Gossypium hirsutum
agctcagagccacgaatgg

SEQ ID NO: 16954 - DNA, 17 bp, Gossypium hirsutum
ctaagttggcgcttgtt

SEQ ID NO: 16955 - DNA, 17 bp, Gossypium hirsutum
ctaagttggagcttgtt

SEQ ID NO: 16956 - DNA, 23 bp, Gossypium hirsutum
agcacgagttcccttctacctat

SEQ ID NO: 16957 - DNA, 25 bp, Gossypium hirsutum
caatcttcacaacatgtctgtgtgc

SEQ ID NO: 16958 - DNA, 26 bp, Gossypium hirsutum
atagtaatctgtgattttataataga

SEQ ID NO: 16959 - DNA, 21 bp, Gossypium hirsutum
aatctgtgattttacaataga

SEQ ID NO: 16960 - DNA, 25 bp, Gossypium hirsutum
ggttttttacgcccttaagccaata

SEQ ID NO: 16961 - DNA, 25 bp, Gossypium hirsutum
ggacaattcaacctcgagtttctga

SEQ ID NO: 16962 - DNA, 16 bp, Gossypium hirsutum
aatgctttcagtttcc

SEQ ID NO: 16963 - DNA, 14 bp, Gossypium hirsutum
tgctttcggtttcc

SEQ ID NO: 16964 - DNA, 29 bp, Gossypium hirsutum
aactatctggagagtatgatcatcgaagt

SEQ ID NO: 16965 - DNA, 21 bp, Gossypium hirsutum
agaagaagcatggagcggaaa

SEQ ID NO: 16966 - DNA, 16 bp, Gossypium hirsutum
ctccactaagggtttt

SEQ ID NO: 16967 - DNA, 16 bp, Gossypium hirsutum
ctccactaaaggtttt

SEQ ID NO: 16968 - DNA, 25 bp, Gossypium hirsutum
ccacacaaccaaacactcgaaaatg

SEQ ID NO: 16969 - DNA, 23 bp, Gossypium hirsutum
cccttaaattgcttggcatgcta

SEQ ID NO: 16970 - DNA, 14 bp, Gossypium hirsutum
cagaccgaaggttc

SEQ ID NO: 16971 - DNA, 14 bp, Gossypium hirsutum
cagaccggaggttc

SEQ ID NO: 16972 - DNA, 22 bp, Gossypium hirsutum
tgcgttgagcttcctgtaagaa

SEQ ID NO: 16973 - DNA, 24 bp, Gossypium hirsutum
cagagtaatgatgtcgatggtggt

SEQ ID NO: 16974 - DNA, 17 bp, Gossypium hirsutum
tgaggatggagttcgtt

SEQ ID NO: 16975 - DNA, 15 bp, Gossypium hirsutum
aggatggagatcgtt

SEQ ID NO: 16976 - DNA, 25 bp, Gossypium hirsutum
ggaatcgaggaacatggagaaaatg

SEQ ID NO: 16977 - DNA, 25 bp, Gossypium hirsutum
gggactaggtgtcaaagttcaaaca

SEQ ID NO: 16978 - DNA, 18 bp, Gossypium hirsutum
attagagtgtaaaatttc

SEQ ID NO: 16979 - DNA, 17 bp, Gossypium hirsutum
attagagtgtaaatttc

SEQ ID NO: 16980 - DNA, 27 bp, Gossypium hirsutum
gtagatcataaactctagcccaaacgt

SEQ ID NO: 16981 - DNA, 18 bp, Gossypium hirsutum
gcaggagtggtggatgga

SEQ ID NO: 16982 - DNA, 14 bp, Gossypium hirsutum
ccaccaccatctct

SEQ ID NO: 16983 - DNA, 14 bp, Gossypium hirsutum
ccaccaacatctct

SEQ ID NO: 16984 - DNA, 18 bp, Gossypium hirsutum
gaccacccccacgtctac

SEQ ID NO: 16985 - DNA, 32 bp, Gossypium hirsutum
tcttcactttttttcttaactatgtacaccct

SEQ ID NO: 16986 - DNA, 22 bp, Gossypium hirsutum
ctcacataaatagtatttaggc

SEQ ID NO: 16987 - DNA, 20 bp, Gossypium hirsutum
cacataaatagtgtttaggc

SEQ ID NO: 16988 - DNA, 25 bp, Gossypium hirsutum
gtccagaacgttcaagttgcaaaat

SEQ ID NO: 16989 - DNA, 19 bp, Gossypium hirsutum
ccgagaatgcccgatgctt

SEQ ID NO: 16990 - DNA, 21 bp, Gossypium hirsutum
caacttcttaagctcagacag

SEQ ID NO: 16991 - DNA, 21 bp, Gossypium hirsutum
caacttcttaaactcagacag

SEQ ID NO: 16992 - DNA, 25 bp, Gossypium hirsutum
ggctaagctttgttcaaggaaactc

SEQ ID NO: 16993 - DNA, 26 bp, Gossypium hirsutum
ctgtgccacaaatcaaaaacaagact

SEQ ID NO: 16994 - DNA, 16 bp, Gossypium hirsutum
ctgttgttccgtctcc

SEQ ID NO: 16995 - DNA, 16 bp, Gossypium hirsutum
ctgttgttccatctcc

SEQ ID NO: 16996 - DNA, 25 bp, Gossypium hirsutum
gacatgacagccttctaagaatcca

SEQ ID NO: 16997 - DNA, 26 bp, Gossypium hirsutum
gtttggtcttttaggtgtttcagcat

SEQ ID NO: 16998 - DNA, 17 bp, Gossypium hirsutum
ttgtttctgaacttttc

SEQ ID NO: 16999 - DNA, 17 bp, Gossypium hirsutum
ttgtttctgaccttttc

SEQ ID NO: 17000 - DNA, 33 bp, Gossypium hirsutum
acagctcaaaattaccattgaaacaaatagaaa

SEQ ID NO: 17001 - DNA, 20 bp, Gossypium hirsutum
acctcaagctgtgcctgaat

SEQ ID NO: 17002 - DNA, 16 bp, Gossypium hirsutum
acttctggaattgatc

SEQ ID NO: 17003 - DNA, 15 bp, Gossypium hirsutum
cttctggcattgatc

SEQ ID NO: 17004 - DNA, 28 bp, Gossypium hirsutum
ggctgcttcaagtcaatttcttgataaa

SEQ ID NO: 17005 - DNA, 23 bp, Gossypium hirsutum
aactgcgtttgcttgttgtactg

SEQ ID NO: 17006 - DNA, 17 bp, Gossypium hirsutum
aataatggtgtagcccc

SEQ ID NO: 17007 - DNA, 17 bp, Gossypium hirsutum
aataatggtgtatcccc

SEQ ID NO: 17008 - DNA, 25 bp, Gossypium hirsutum
acctatttgtttgggctgacttctt

SEQ ID NO: 17009 - DNA, 29 bp, Gossypium hirsutum
caatttgtggaatagctcaagtttcaact

SEQ ID NO: 17010 - DNA, 14 bp, Gossypium hirsutum
cactggccaacgta

SEQ ID NO: 17011 - DNA, 15 bp, Gossypium hirsutum
ccactggacaacgta

SEQ ID NO: 17012 - DNA, 26 bp, Gossypium hirsutum
caatacaaacaagtgactcgcataca

SEQ ID NO: 17013 - DNA, 33 bp, Gossypium hirsutum
actatttttttttaatataggcggcaaaatgca

SEQ ID NO: 17014 - DNA, 22 bp, Gossypium hirsutum
tcattaatataggtgcttcaac

SEQ ID NO: 17015 - DNA, 21 bp, Gossypium hirsutum
cattaatataggtgcttccac

SEQ ID NO: 17016 - DNA, 27 bp, Gossypium hirsutum
gttccgcaactttctatctttgacaat

SEQ ID NO: 17017 - DNA, 25 bp, Gossypium hirsutum
cctgatccactttcctgtaaatgca

SEQ ID NO: 17018 - DNA, 14 bp, Gossypium hirsutum
caaccaagtggccc

SEQ ID NO: 17019 - DNA, 14 bp, Gossypium hirsutum
caaccatgtggccc

SEQ ID NO: 17020 - DNA, 21 bp, Gossypium hirsutum
tcattcttggacccgcttctg

SEQ ID NO: 17021 - DNA, 25 bp, Gossypium hirsutum
gcaaggtaaggactaaggactatgc

SEQ ID NO: 17022 - DNA, 23 bp, Gossypium hirsutum
ctgcaataaggtttttttgtaaa

SEQ ID NO: 17023 - DNA, 22 bp, Gossypium hirsutum
ctgcaataaggttttttgtaaa

SEQ ID NO: 17024 - DNA, 25 bp, Gossypium hirsutum
ggtcaatcagccatatcagttccta

SEQ ID NO: 17025 - DNA, 27 bp, Gossypium hirsutum
cgtaaagcattctcctacgttttaacc

SEQ ID NO: 17026 - DNA, 20 bp, Gossypium hirsutum
cctcttgtcaatagtgaaaa

SEQ ID NO: 17027 - DNA, 18 bp, Gossypium hirsutum
tcttgtcaatagggaaaa

SEQ ID NO: 17028 - DNA, 26 bp, Gossypium hirsutum
caaagcaacgtgaagaaagaatagca

SEQ ID NO: 17029 - DNA, 25 bp, Gossypium hirsutum
agggtgtacggaagtaaagatctga

SEQ ID NO: 17030 - DNA, 16 bp, Gossypium hirsutum
actggaaaagggaatc

SEQ ID NO: 17031 - DNA, 14 bp, Gossypium hirsutum
tggaacagggaatc

SEQ ID NO: 17032 - DNA, 26 bp, Gossypium hirsutum
catagttggtagctcttaggttctcg

SEQ ID NO: 17033 - DNA, 25 bp, Gossypium hirsutum
aacgtacacggactaatttgcctat

SEQ ID NO: 17034 - DNA, 22 bp, Gossypium hirsutum
aaagcaaaatacaatctaactc

SEQ ID NO: 17035 - DNA, 22 bp, Gossypium hirsutum
aaagcaaaatacaatctgactc

SEQ ID NO: 17036 - DNA, 25 bp, Gossypium hirsutum
ccactgctaacagtcttacattggt

SEQ ID NO: 17037 - DNA, 33 bp, Gossypium hirsutum
tggttttttacgagtcaagtcaggataaattat

SEQ ID NO: 17038 - DNA, 23 bp, Gossypium hirsutum
tcactacactaatatttaaagtt

SEQ ID NO: 17039 - DNA, 21 bp, Gossypium hirsutum
actacactaatatgtaaagtt

SEQ ID NO: 17040 - DNA, 31 bp, Gossypium hirsutum
gatgcagtaatttcagccttaaaatgcttaa

SEQ ID NO: 17041 - DNA, 26 bp, Gossypium hirsutum
tggaagttaagggtcagtcataaacc

SEQ ID NO: 17042 - DNA, 18 bp, Gossypium hirsutum
atgtccatgaggtaacga

SEQ ID NO: 17043 - DNA, 18 bp, Gossypium hirsutum
atgtccatgaagtaacga

SEQ ID NO: 17044 - DNA, 18 bp, Gossypium hirsutum
cgcgttgctcgagtttcc

SEQ ID NO: 17045 - DNA, 33 bp, Gossypium hirsutum
atgtataaaaaatgaaaaacaggaaaggaacca

SEQ ID NO: 17046 - DNA, 18 bp, Gossypium hirsutum
agatgcatgacatacata

SEQ ID NO: 17047 - DNA, 18 bp, Gossypium hirsutum
agatgcatgagatacata

SEQ ID NO: 17048 - DNA, 28 bp, Gossypium hirsutum
ttggtggtcgatatgactatctacttca

SEQ ID NO: 17049 - DNA, 25 bp, Gossypium hirsutum
tggatgacaaacacttggagctatt

SEQ ID NO: 17050 - DNA, 18 bp, Gossypium hirsutum
tcgagtcaaatcaagact

SEQ ID NO: 17051 - DNA, 18 bp, Gossypium hirsutum
tcgagtcaaatcgagact

SEQ ID NO: 17052 - DNA, 25 bp, Gossypium hirsutum
tcggcccaaaaatgaatctgagaat

SEQ ID NO: 17053 - DNA, 29 bp, Gossypium hirsutum
tcctgtttattatgtactggtggtgtttt

SEQ ID NO: 17054 - DNA, 17 bp, Gossypium hirsutum
ctggcgtaaatatgttt

SEQ ID NO: 17055 - DNA, 17 bp, Gossypium hirsutum
ctggcgtaaatgtgttt

SEQ ID NO: 17056 - DNA, 29 bp, Gossypium hirsutum
acaacataggagtttcagactatggctat

SEQ ID NO: 17057 - DNA, 25 bp, Gossypium hirsutum
actgtgcttgttgtggacatttact

SEQ ID NO: 17058 - DNA, 21 bp, Gossypium hirsutum
attatacgtgatgatatttta

SEQ ID NO: 17059 - DNA, 16 bp, Gossypium hirsutum
acgtgatggtatttta

SEQ ID NO: 17060 - DNA, 27 bp, Gossypium hirsutum
agtcccaaatggaacaaacaaaatgag

SEQ ID NO: 17061 - DNA, 29 bp, Gossypium hirsutum
gaggcaattaatcagacatagttaagcct

SEQ ID NO: 17062 - DNA, 22 bp, Gossypium hirsutum
ctcaaatttatccccttagttg

SEQ ID NO: 17063 - DNA, 22 bp, Gossypium hirsutum
ctcaaatttatccctttagttg

SEQ ID NO: 17064 - DNA, 35 bp, Gossypium hirsutum
agactcaaattacaaacctattaaataccaacgat

SEQ ID NO: 17065 - DNA, 32 bp, Gossypium hirsutum
tgggtcttaaacctatagttaagactaaaggt

SEQ ID NO: 17066 - DNA, 21 bp, Gossypium hirsutum
tcagttaatctttcagtggcc

SEQ ID NO: 17067 - DNA, 19 bp, Gossypium hirsutum
agttaatctttcggtggcc

SEQ ID NO: 17068 - DNA, 45 bp, Gossypium hirsutum
ctaaattagcttataaccaaaatttcaaaaagtcattaatcaatt

SEQ ID NO: 17069 - DNA, 36 bp, Gossypium hirsutum
ctacaaatgctgattattttggaataaaacatttca

SEQ ID NO: 17070 - DNA, 24 bp, Gossypium hirsutum
cttgcttatctctttatatcttat

SEQ ID NO: 17071 - DNA, 23 bp, Gossypium hirsutum
ttgcttatctctttatatattat

SEQ ID NO: 17072 - DNA, 26 bp, Gossypium hirsutum
agaaattgacgatgaccagaaactgt

SEQ ID NO: 17073 - DNA, 27 bp, Gossypium hirsutum
gttcagtgttagaagggaattgacaga

SEQ ID NO: 17074 - DNA, 18 bp, Gossypium hirsutum
tgcatgaaaagtaattaa

SEQ ID NO: 17075 - DNA, 18 bp, Gossypium hirsutum
tgcatgaaaattaattaa

SEQ ID NO: 17076 - DNA, 27 bp, Gossypium hirsutum
tgacttgtcattctttgactccttgtt

SEQ ID NO: 17077 - DNA, 28 bp, Gossypium hirsutum
gcctttgtttctttttcggactaatctt

SEQ ID NO: 17078 - DNA, 20 bp, Gossypium hirsutum
caattttttgaattaaaatc

SEQ ID NO: 17079 - DNA, 19 bp, Gossypium hirsutum
aattttttgaaataaaatc

SEQ ID NO: 17080 - DNA, 33 bp, Gossypium hirsutum
aaataagttagattcaaaactcaaaaggtgcaa

SEQ ID NO: 17081 - DNA, 21 bp, Gossypium hirsutum
gttccaaccatccaccacagt

SEQ ID NO: 17082 - DNA, 14 bp, Gossypium hirsutum
tcgagggcattaat

SEQ ID NO: 17083 - DNA, 14 bp, Gossypium hirsutum
tcgagggccttaat

SEQ ID NO: 17084 - DNA, 21 bp, Gossypium hirsutum
tcaatggaactgctggtgtgt

SEQ ID NO: 17085 - DNA, 25 bp, Gossypium hirsutum
gctccaggagattcaccttattctg

SEQ ID NO: 17086 - DNA, 18 bp, Gossypium hirsutum
ttctgagaatgaggaatt

SEQ ID NO: 17087 - DNA, 18 bp, Gossypium hirsutum
ttctgagaatgaagaatt

SEQ ID NO: 17088 - DNA, 19 bp, Gossypium hirsutum
gcggttctggatgtttgca

SEQ ID NO: 17089 - DNA, 26 bp, Gossypium hirsutum
tctgcagtttcttctctgttaaagct

SEQ ID NO: 17090 - DNA, 23 bp, Gossypium hirsutum
ctgcatttttattttttttattc

SEQ ID NO: 17091 - DNA, 21 bp, Gossypium hirsutum
tgcatttttatttttttattc

SEQ ID NO: 17092 - DNA, 32 bp, Gossypium hirsutum
gctctgataccaattgtaagattcaaatgaag

SEQ ID NO: 17093 - DNA, 25 bp, Gossypium hirsutum
ggtggaacttgaagtacctttgaag

SEQ ID NO: 17094 - DNA, 21 bp, Gossypium hirsutum
catatatgaatgtacaagcaa

SEQ ID NO: 17095 - DNA, 21 bp, Gossypium hirsutum
catatatgaatgtaaaagcaa

SEQ ID NO: 17096 - DNA, 21 bp, Gossypium hirsutum
gggcgcatagcaactccatat

SEQ ID NO: 17097 - DNA, 36 bp, Gossypium hirsutum
aaaacaaatcaaaggatgaaaaagaataagagagtt

SEQ ID NO: 17098 - DNA, 15 bp, Gossypium hirsutum
cccttcgtcttcctc

SEQ ID NO: 17099 - DNA, 16 bp, Gossypium hirsutum
tcccttcctcttcctc

SEQ ID NO: 17100 - DNA, 35 bp, Gossypium hirsutum
ttgtcttcaattttctctcttaatttccttttgag

SEQ ID NO: 17101 - DNA, 25 bp, Gossypium hirsutum
acttccaattttccaaccctttcct

SEQ ID NO: 17102 - DNA, 23 bp, Gossypium hirsutum
ttacatttataaacgtaatactg

SEQ ID NO: 17103 - DNA, 23 bp, Gossypium hirsutum
ttacatttataaacataatactg

SEQ ID NO: 17104 - DNA, 29 bp, Gossypium hirsutum
cttgagacctcgttttttattcactaggt

SEQ ID NO: 17105 - DNA, 31 bp, Gossypium hirsutum
aattcaaattttaaatgtagccatcgtggtt

SEQ ID NO: 17106 - DNA, 18 bp, Gossypium hirsutum
cccttttaattcaaattt

SEQ ID NO: 17107 - DNA, 17 bp, Gossypium hirsutum
cccttttattcaaattt

SEQ ID NO: 17108 - DNA, 32 bp, Gossypium hirsutum
tggaccatctatatattattgtcactcgtgat

SEQ ID NO: 17109 - DNA, 27 bp, Gossypium hirsutum
gggaagaactgacacaatcatttcaaa

SEQ ID NO: 17110 - DNA, 20 bp, Gossypium hirsutum
cagagtaacagataacacac

SEQ ID NO: 17111 - DNA, 19 bp, Gossypium hirsutum
agagtaacagatgacacac

SEQ ID NO: 17112 - DNA, 25 bp, Gossypium hirsutum
cgttgatcacatttactggtgtcaa

SEQ ID NO: 17113 - DNA, 25 bp, Gossypium hirsutum
aggccaaactcctgaatcaatcatt

SEQ ID NO: 17114 - DNA, 17 bp, Gossypium hirsutum
catacgatgacacattc

SEQ ID NO: 17115 - DNA, 16 bp, Gossypium hirsutum
atacgatgacgcattc

SEQ ID NO: 17116 - DNA, 25 bp, Gossypium hirsutum
ggattaaggcattcttctggactgt

SEQ ID NO: 17117 - DNA, 33 bp, Gossypium hirsutum
ctgttgctaggtgatgctctatgttttataata

SEQ ID NO: 17118 - DNA, 20 bp, Gossypium hirsutum
attgaacaacaaattataac

SEQ ID NO: 17119 - DNA, 19 bp, Gossypium hirsutum
ttgaacaacaaactataac

SEQ ID NO: 17120 - DNA, 43 bp, Gossypium hirsutum
ctatttagtattcagatgaacaacatttagatttctttagatc

SEQ ID NO: 17121 - DNA, 17 bp, Gossypium hirsutum
cccctcaccccccattg

SEQ ID NO: 17122 - DNA, 15 bp, Gossypium hirsutum
cccctcctcccttcc

SEQ ID NO: 17123 - DNA, 14 bp, Gossypium hirsutum
ccctccttccttcc

SEQ ID NO: 17124 - DNA, 23 bp, Gossypium hirsutum
gctgctgaggaatgggaagaaaa

SEQ ID NO: 17125 - DNA, 24 bp, Gossypium hirsutum
cctgcaagagaagaaggacctttt

SEQ ID NO: 17126 - DNA, 15 bp, Gossypium hirsutum
cgcgaatctccccgc

SEQ ID NO: 17127 - DNA, 15 bp, Gossypium hirsutum
cgcgaatctcgccgc

SEQ ID NO: 17128 - DNA, 25 bp, Gossypium hirsutum
ctccaaaacggtgtcgtattaacat

SEQ ID NO: 17129 - DNA, 39 bp, Gossypium hirsutum
actaatagtaaaatatacatggtaagctttaacttaggc

SEQ ID NO: 17130 - DNA, 18 bp, Gossypium hirsutum
actgttacatggcctacc

SEQ ID NO: 17131 - DNA, 21 bp, Gossypium hirsutum
ttaactgttacattgcctacc

SEQ ID NO: 17132 - DNA, 27 bp, Gossypium hirsutum
tcatttccagtattgtacacaaggctt

SEQ ID NO: 17133 - DNA, 23 bp, Gossypium hirsutum
ccaacttcctggcttgtaaacac

SEQ ID NO: 17134 - DNA, 15 bp, Gossypium hirsutum
cccactgtgaccaag

SEQ ID NO: 17135 - DNA, 14 bp, Gossypium hirsutum
ccactgtggccaag

SEQ ID NO: 17136 - DNA, 32 bp, Gossypium hirsutum
aggtctctatgatacttttaccgattatcctt

SEQ ID NO: 17137 - DNA, 27 bp, Gossypium hirsutum
tgataaatgtattgacagcgcacaaag

SEQ ID NO: 17138 - DNA, 18 bp, Gossypium hirsutum
ctgcctggtatgatagta

SEQ ID NO: 17139 - DNA, 17 bp, Gossypium hirsutum
tgcctggtaagatagta

SEQ ID NO: 17140 - DNA, 33 bp, Gossypium hirsutum
ggccaacagaatattatcaggaatattatcaga

SEQ ID NO: 17141 - DNA, 27 bp, Gossypium hirsutum
ggtcccgtttaaaatatggatcaagct

SEQ ID NO: 17142 - DNA, 17 bp, Gossypium hirsutum
attctagcccagccggt

SEQ ID NO: 17143 - DNA, 15 bp, Gossypium hirsutum
tctagcccggccggt

SEQ ID NO: 17144 - DNA, 39 bp, Gossypium hirsutum
actacagatttagtttttatgtgctataaattatcccat

SEQ ID NO: 17145 - DNA, 25 bp, Gossypium hirsutum
ccaaacacactctaagggtcttgaa

SEQ ID NO: 17146 - DNA, 16 bp, Gossypium hirsutum
acgcacttctgattac

SEQ ID NO: 17147 - DNA, 16 bp, Gossypium hirsutum
acgcacttcttattac

SEQ ID NO: 17148 - DNA, 28 bp, Gossypium hirsutum
cgcagatagattgaggatcatagaaaca

SEQ ID NO: 17149 - DNA, 27 bp, Gossypium hirsutum
tcttgtgggctcattttctaatacgat

SEQ ID NO: 17150 - DNA, 19 bp, Gossypium hirsutum
aatgacgtacaagtagtgg

SEQ ID NO: 17151 - DNA, 18 bp, Gossypium hirsutum
atgacgtacaaatagtgg

SEQ ID NO: 17152 - DNA, 44 bp, Gossypium hirsutum
gagtttaaattattgacttcgatattaattttaagagtaaacgt

SEQ ID NO: 17153 - DNA, 35 bp, Gossypium hirsutum
ggttttaaattgatttgtgatctatatgcatacca

SEQ ID NO: 17154 - DNA, 25 bp, Gossypium hirsutum
agtatttgaatattttaaaataaat

SEQ ID NO: 17155 - DNA, 21 bp, Gossypium hirsutum
tttgaatattttgaaataaat

SEQ ID NO: 17156 - DNA, 44 bp, Gossypium hirsutum
ttatttaagaattgagtaagaattatggatagttctagatcttg

SEQ ID NO: 17157 - DNA, 33 bp, Gossypium hirsutum
aggatccttaaaatatatggagggaaaaaaaca

SEQ ID NO: 17158 - DNA, 22 bp, Gossypium hirsutum
catatttgatgctataagagtt

SEQ ID NO: 17159 - DNA, 19 bp, Gossypium hirsutum
atttgatgctagaagagtt

SEQ ID NO: 17160 - DNA, 28 bp, Gossypium hirsutum
ctgcttctagtgtataactggtattgca

SEQ ID NO: 17161 - DNA, 31 bp, Gossypium hirsutum; identical to SEQ ID NO: 16645

SEQ ID NO: 17162 - DNA, 24 bp, Gossypium hirsutum
aaaagtttttgatgagatgctaga

SEQ ID NO: 17163 - DNA, 21 bp, Gossypium hirsutum
agtttttgatgagatgccaga

SEQ ID NO: 17164 - DNA, 28 bp, Gossypium hirsutum
gcaaaatgtggagagataaataaagcga

SEQ ID NO: 17165 - DNA, 29 bp, Gossypium hirsutum
gggcaaaaaagcctttaattttagtggaa

SEQ ID NO: 17166 - DNA, 15 bp, Gossypium hirsutum
caaaggaagaaaacc

SEQ ID NO: 17167 - DNA, 15 bp, Gossypium hirsutum
caaaggaataaaacc

SEQ ID NO: 17168 - DNA, 24 bp, Gossypium hirsutum
gccagcagggtacaatcaaatatg

SEQ ID NO: 17169 - DNA, 34 bp, Gossypium hirsutum
gccaatttagatatccaactaaaacaagaatagg

SEQ ID NO: 17170 - DNA, 22 bp, Gossypium hirsutum
tccgaattaaaaaaaaattata

SEQ ID NO: 17171 - DNA, 20 bp, Gossypium hirsutum
ccgaattaaaaaaaattata

SEQ ID NO: 17172 - DNA, 30 bp, Gossypium hirsutum
gaaaatgactgcctaactatctcaatacca

SEQ ID NO: 17173 - DNA, 27 bp, Gossypium hirsutum
ttttccttgtacaatgtgtttggcatt

SEQ ID NO: 17174 - DNA, 18 bp, Gossypium hirsutum
tcggtttttgccccttag

SEQ ID NO: 17175 - DNA, 19 bp, Gossypium hirsutum
ttcggtttttgtcccttag

SEQ ID NO: 17176 - DNA, 25 bp, Gossypium hirsutum
cactcagcttcaagtacacgaaatg

SEQ ID NO: 17177 - DNA, 23 bp, Gossypium hirsutum
gcattgaccgtgctccgtataat

SEQ ID NO: 17178 - DNA, 16 bp, Gossypium hirsutum
ttactgccaagaagac

SEQ ID NO: 17179 - DNA, 13 bp, Gossypium hirsutum
ctgccgagaagac

SEQ ID NO: 17180 - DNA, 24 bp, Gossypium hirsutum
ggtgaactcacaaggttgatttgc

SEQ ID NO: 17181 - DNA, 27 bp, Gossypium hirsutum
ttgcaattttatttctgccctattccg

SEQ ID NO: 17182 - DNA, 23 bp, Gossypium hirsutum
ctgttatagtaattttcaagttt

SEQ ID NO: 17183 - DNA, 23 bp, Gossypium hirsutum
ctgttatagtaatttttaagttt

SEQ ID NO: 17184 - DNA, 25 bp, Gossypium hirsutum
ggcgtgtggtgttgaataacaattc

SEQ ID NO: 17185 - DNA, 23 bp, Gossypium hirsutum
aactgatcacgccttgcatctat

SEQ ID NO: 17186 - DNA, 19 bp, Gossypium hirsutum
aatctctgagtagtgattg

SEQ ID NO: 17187 - DNA, 17 bp, Gossypium hirsutum
tctctgagtaatgattg

SEQ ID NO: 17188 - DNA, 23 bp, Gossypium hirsutum
gcgaccaccattgcaattgatag

SEQ ID NO: 17189 - DNA, 28 bp, Gossypium hirsutum
gaacaggtagtttcctactcgtaaaaca

SEQ ID NO: 17190 - DNA, 16 bp, Gossypium hirsutum
tgcagtttctttttct

SEQ ID NO: 17191 - DNA, 16 bp, Gossypium hirsutum
tgcagtttctgtttct

SEQ ID NO: 17192 - DNA, 25 bp, Gossypium hirsutum
gattcacctaagaagggaagctgat

SEQ ID NO: 17193 - DNA, 23 bp, Gossypium hirsutum
tcagcgaatcaacgtgatggatt

SEQ ID NO: 17194 - DNA, 19 bp, Gossypium hirsutum
ctcgtttcattgactatgt

SEQ ID NO: 17195 - DNA, 19 bp, Gossypium hirsutum
ctcgtttcattcactatgt

SEQ ID NO: 17196 - DNA, 22 bp, Gossypium hirsutum
gggcaaaacataggcaaacctt

SEQ ID NO: 17197 - DNA, 28 bp, Gossypium hirsutum
cttggccatctttcctacaataatgaac

SEQ ID NO: 17198 - DNA, 16 bp, Gossypium hirsutum
cactgcacaggtgcat

SEQ ID NO: 17199 - DNA, 16 bp, Gossypium hirsutum
cactgcacaagtgcat

SEQ ID NO: 17200 - DNA, 30 bp, Gossypium hirsutum
ctttcatattttccttttccatgttttggc

SEQ ID NO: 17201 - DNA, 25 bp, Gossypium hirsutum
cgatccatttcttgtgcaatcatgt

SEQ ID NO: 17202 - DNA, 16 bp, Gossypium hirsutum
cgttgaaggcagatta

SEQ ID NO: 17203 - DNA, 17 bp, Gossypium hirsutum
tcgttgaaagcagatta

SEQ ID NO: 17204 - DNA, 31 bp, Gossypium hirsutum
ctcccagtgagctgtttttttaatattttct

SEQ ID NO: 17205 - DNA, 23 bp, Gossypium hirsutum
caccttttggagcttcctatgga

SEQ ID NO: 17206 - DNA, 18 bp, Gossypium hirsutum
caaacctcaaacacgttc

SEQ ID NO: 17207 - DNA, 15 bp, Gossypium hirsutum
acctcaagcacgttc

SEQ ID NO: 17208 - DNA, 25 bp, Gossypium hirsutum
ctcaccttagttccaaatggcaaag

SEQ ID NO: 17209 - DNA, 20 bp, Gossypium hirsutum
gagctaaagtgagggtgcca

SEQ ID NO: 17210 - DNA, 16 bp, Gossypium hirsutum
ctcgtccctcgtccct

SEQ ID NO: 17211 - DNA, 16 bp, Gossypium hirsutum
ctcgtccctagtccct

SEQ ID NO: 17212 - DNA, 23 bp, Gossypium hirsutum
tccaaatgttggcttggttggta

SEQ ID NO: 17213 - DNA, 26 bp, Gossypium hirsutum
cccatgctttcattttaagcacacta

SEQ ID NO: 17214 - DNA, 17 bp, Gossypium hirsutum
attccattccataaccg

SEQ ID NO: 17215 - DNA, 18 bp, Gossypium hirsutum
cattccattctataaccg

SEQ ID NO: 17216 - DNA, 26 bp, Gossypium hirsutum
agtgtgttggacttggaaaaagtaca

SEQ ID NO: 17217 - DNA, 22 bp, Gossypium hirsutum
agctatgccagaggtgaaaagc

SEQ ID NO: 17218 - DNA, 17 bp, Gossypium hirsutum
ccaccagaaactaattt

SEQ ID NO: 17219 - DNA, 17 bp, Gossypium hirsutum
ccaccagaaattaattt

SEQ ID NO: 17220 - DNA, 25 bp, Gossypium hirsutum
tgttgaaatatgggcatgaggacat

SEQ ID NO: 17221 - DNA, 30 bp, Gossypium hirsutum
tctagccttctaaagtccatctaagtacat

SEQ ID NO: 17222 - DNA, 19 bp, Gossypium hirsutum
ttgaacatacccatgttgg

SEQ ID NO: 17223 - DNA, 18 bp, Gossypium hirsutum
tgaacatacccgtgttgg

SEQ ID NO: 17224 - DNA, 30 bp, Gossypium hirsutum
ctctggtttgagtgtgaaatatggatatgt

SEQ ID NO: 17225 - DNA, 32 bp, Gossypium hirsutum
agaaggtagaacttgtaaattttgatgaccaa

SEQ ID NO: 17226 - DNA, 17 bp, Gossypium hirsutum
accttacataaaatctc

SEQ ID NO: 17227 - DNA, 16 bp, Gossypium hirsutum
accttacataaatctc

SEQ ID NO: 17228 - DNA, 25 bp, Gossypium hirsutum
ggcatgagattgttaccctcctttt

SEQ ID NO: 17229 - DNA, 40 bp, Gossypium hirsutum
gttgttgttttccactttatgttttatttatgatttaagt

SEQ ID NO: 17230 - DNA, 19 bp, Gossypium hirsutum
accaaaggaactacataag

SEQ ID NO: 17231 - DNA, 19 bp, Gossypium hirsutum
accaaagaaactacataag

SEQ ID NO: 17232 - DNA, 27 bp, Gossypium hirsutum
tccaaaagccaaatagaaaacaaacca

SEQ ID NO: 17233 - DNA, 31 bp, Gossypium hirsutum
tgaagttccaagaggttttagtttaacatga

SEQ ID NO: 17234 - DNA, 16 bp, Gossypium hirsutum
caagatccaaaagttg

SEQ ID NO: 17235 - DNA, 16 bp, Gossypium hirsutum
caagatccaagagttg

SEQ ID NO: 17236 - DNA, 21 bp, Gossypium hirsutum
tgtggccttttggtacatgct

SEQ ID NO: 17237 - DNA, 25 bp, Gossypium hirsutum
gcaggtgtgatctagtgtaatcgtt

SEQ ID NO: 17238 - DNA, 21 bp, Gossypium hirsutum
ccaaaagaaatgtaacatgac

SEQ ID NO: 17239 - DNA, 20 bp, Gossypium hirsutum
caaaagaaatgttacatgac

SEQ ID NO: 17240 - DNA, 41 bp, Gossypium hirsutum
tgagtttttaataaaagaaaaagaaaattgggtacattcta

SEQ ID NO: 17241 - DNA, 28 bp, Gossypium hirsutum
gctttatgattttctcacaggaattggt

SEQ ID NO: 17242 - DNA, 16 bp, Gossypium hirsutum
tgatgcaaaggttgct

SEQ ID NO: 17243 - DNA, 14 bp, Gossypium hirsutum
atgcgaaggttgct

SEQ ID NO: 17244 - DNA, 23 bp, Gossypium hirsutum
tctcgcaagttgtgaatgtccaa

SEQ ID NO: 17245 - DNA, 33 bp, Gossypium hirsutum
tgatgatgagaaacgaattaatgtttagcttct

SEQ ID NO: 17246 - DNA, 24 bp, Gossypium hirsutum
ataaaagttattagcttcttaccc

SEQ ID NO: 17247 - DNA, 20 bp, Gossypium hirsutum
aagttattagcttattaccc

SEQ ID NO: 17248 - DNA, 35 bp, Gossypium hirsutum
ttgattattttagtccctctacttttcattcaagt

SEQ ID NO: 17249 - DNA, 29 bp, Gossypium hirsutum
cttagtttaccaaatgtcttgttgccaat

SEQ ID NO: 17250 - DNA, 20 bp, Gossypium hirsutum
aacctcatctgtttctcgag

SEQ ID NO: 17251 - DNA, 18 bp, Gossypium hirsutum
cctcatctgtatctcgag

SEQ ID NO: 17252 - DNA, 17 bp, Gossypium hirsutum
tcctcccgtggctaggg

SEQ ID NO: 17253 - DNA, 25 bp, Gossypium hirsutum
agttgtccaaaagcactgtacttca

SEQ ID NO: 17254 - DNA, 17 bp, Gossypium hirsutum
ccgtagaaccatattat

SEQ ID NO: 17255 - DNA, 17 bp, Gossypium hirsutum
ccgtaaaaccatattat

SEQ ID NO: 17256 - DNA, 26 bp, Gossypium hirsutum
gcatgctttatgcaagcttctttact

SEQ ID NO: 17257 - DNA, 25 bp, Gossypium hirsutum
cgagaacactgggattgtgattcag

SEQ ID NO: 17258 - DNA, 16 bp, Gossypium hirsutum
caccgatcctgcattt

SEQ ID NO: 17259 - DNA, 16 bp, Gossypium hirsutum
caccgatcctacattt

SEQ ID NO: 17260 - DNA, 27 bp, Gossypium hirsutum
gtttcaaaatcggatttaacggcttct

SEQ ID NO: 17261 - DNA, 25 bp, Gossypium hirsutum
ggtatatatgcatagggcctgtgaa

SEQ ID NO: 17262 - DNA, 16 bp, Gossypium hirsutum
attctccaggcttacc

SEQ ID NO: 17263 - DNA, 16 bp, Gossypium hirsutum
attctccacgcttacc

SEQ ID NO: 17264 - DNA, 34 bp, Gossypium hirsutum
ctctcttctatatcaaaatctaagatcatgtcca

SEQ ID NO: 17265 - DNA, 25 bp, Gossypium hirsutum
gctgtcagaatcgtgttcatgaatg

SEQ ID NO: 17266 - DNA, 18 bp, Gossypium hirsutum
ctgcatgaattacagtgc

SEQ ID NO: 17267 - DNA, 18 bp, Gossypium hirsutum
ctgcatgaataacagtgc

SEQ ID NO: 17268 - DNA, 32 bp, Gossypium hirsutum
gcaatgcaaattaaatataacagtaggtcgaa

SEQ ID NO: 17269 - DNA, 26 bp, Gossypium hirsutum
agatcaagttactgggcgataaacaa

SEQ ID NO: 17270 - DNA, 17 bp, Gossypium hirsutum
cagattcaaagaaagtg

SEQ ID NO: 17271 - DNA, 17 bp, Gossypium hirsutum
cagattcaacgaaagtg

SEQ ID NO: 17272 - DNA, 23 bp, Gossypium hirsutum
tggaatcgaaacaagggcaaaga

SEQ ID NO: 17273 - DNA, 27 bp, Gossypium hirsutum
tggtttggcattcatagagttttctct

SEQ ID NO: 17274 - DNA, 18 bp, Gossypium hirsutum
tttcagacgttggactac

SEQ ID NO: 17275 - DNA, 18 bp, Gossypium hirsutum
tttcagacattggactac

SEQ ID NO: 17276 - DNA, 25 bp, Gossypium hirsutum
tggagcttccaaattgtcagtgtag

SEQ ID NO: 17277 - DNA, 26 bp, Gossypium hirsutum
ccccaataatgcccaatttctactca

SEQ ID NO: 17278 - DNA, 18 bp, Gossypium hirsutum
aaaatccaagcagtttaa

SEQ ID NO: 17279 - DNA, 21 bp, Gossypium hirsutum
cataaaatccaagtagtttaa

SEQ ID NO: 17280 - DNA, 27 bp, Gossypium hirsutum
gagcgatgagaagatatgattccaact

SEQ ID NO: 17281 - DNA, 29 bp, Gossypium hirsutum
agttaggtactgacagtgatatttaccca

SEQ ID NO: 17282 - DNA, 20 bp, Gossypium hirsutum
ccgttagaattttagattca

SEQ ID NO: 17283 - DNA, 20 bp, Gossypium hirsutum
ccgttagaattttatattca

SEQ ID NO: 17284 - DNA, 30 bp, Gossypium hirsutum
gggatgcttaaataatacaaaaaggtaggg

SEQ ID NO: 17285 - DNA, 23 bp, Gossypium hirsutum
gggctcaggttgaacaagatgat

SEQ ID NO: 17286 - DNA, 22 bp, Gossypium hirsutum
ttgaatcttttacgttataaat

SEQ ID NO: 17287 - DNA, 24 bp, Gossypium hirsutum
ttttgaatcttttactttataaat

SEQ ID NO: 17288 - DNA, 44 bp, Gossypium hirsutum
gaacccaagtccgaaataattatatgatattacttaaaataaaa

SEQ ID NO: 17289 - DNA, 22 bp, Gossypium hirsutum
cctacactgccctttctctgaa

SEQ ID NO: 17290 - DNA, 18 bp, Gossypium hirsutum
aagttgtatcaaaagttg

SEQ ID NO: 17291 - DNA, 17 bp, Gossypium hirsutum
aagttgtatcaaagttg

SEQ ID NO: 17292 - DNA, 23 bp, Gossypium hirsutum
tgccggaatgaaacaagaagcta

SEQ ID NO: 17293 - DNA, 22 bp, Gossypium hirsutum
acttgggcacatttcacctgaa

SEQ ID NO: 17294 - DNA, 20 bp, Gossypium hirsutum
ctcctattgttttaataaag

SEQ ID NO: 17295 - DNA, 19 bp, Gossypium hirsutum
ctcctattgtttaataaag

SEQ ID NO: 17296 - DNA, 23 bp, Gossypium hirsutum
ctgggcatatcgatttcgctttt

SEQ ID NO: 17297 - DNA, 26 bp, Gossypium hirsutum
tgctcgtttaaaaccctaggatttga

SEQ ID NO: 17298 - DNA, 20 bp, Gossypium hirsutum
cttaatctaagcttgatctc

SEQ ID NO: 17299 - DNA, 19 bp, Gossypium hirsutum
ttaatctaagcttaatctc

SEQ ID NO: 17300 - DNA, 30 bp, Gossypium hirsutum
agcaatccaatcggaacttaattagaatca

SEQ ID NO: 17301 - DNA, 25 bp, Gossypium hirsutum
caagcccaacaggccaattaaataa

SEQ ID NO: 17302 - DNA, 17 bp, Gossypium hirsutum
ctcacatcgggtggtac

SEQ ID NO: 17303 - DNA, 17 bp, Gossypium hirsutum
ctcacatcgagtggtac

SEQ ID NO: 17304 - DNA, 24 bp, Gossypium hirsutum
cgacgatggagaaagagacatagg

SEQ ID NO: 17305 - DNA, 25 bp, Gossypium hirsutum
gggcatgtaagcctttattctgttc

SEQ ID NO: 17306 - DNA, 20 bp, Gossypium hirsutum
cattgtcatatgataagtac

SEQ ID NO: 17307 - DNA, 19 bp, Gossypium hirsutum
attgtcatatggtaagtac

SEQ ID NO: 17308 - DNA, 25 bp, Gossypium hirsutum
acagaagccacataaacagatcagt

SEQ ID NO: 17309 - DNA, 26 bp, Gossypium hirsutum
gctccttaccttttattgccttttga

SEQ ID NO: 17310 - DNA, 24 bp, Gossypium hirsutum
ttaatagttacaatgctattatag

SEQ ID NO: 17311 - DNA, 21 bp, Gossypium hirsutum
atagttacaatgctgttatag

SEQ ID NO: 17312 - DNA, 23 bp, Gossypium hirsutum
gctagactaggcctcaagttcga

SEQ ID NO: 17313 - DNA, 35 bp, Gossypium hirsutum
ccagggtttaaacaactaacttgatttctaatatc

SEQ ID NO: 17314 - DNA, 17 bp, Gossypium hirsutum
atgtcttgtcgctaaac

SEQ ID NO: 17315 - DNA, 18 bp, Gossypium hirsutum
aatgtcttgtccctaaac

SEQ ID NO: 17316 - DNA, 35 bp, Gossypium hirsutum
gggtaattacaaataatgaatttaacctgtttcct

SEQ ID NO: 17317 - DNA, 29 bp, Gossypium hirsutum
gcatgtctaaaattttggagattgcacaa

SEQ ID NO: 17318 - DNA, 22 bp, Gossypium hirsutum
tgtatacaataggcattatatt

SEQ ID NO: 17319 - DNA, 20 bp, Gossypium hirsutum
tatacaataggcaatatatt

SEQ ID NO: 17320 - DNA, 32 bp, Gossypium hirsutum
aagcgttcatacttactatattatttctgcca

SEQ ID NO: 17321 - DNA, 25 bp, Gossypium hirsutum
ctccgtttgtatgccagtaaaatgt

SEQ ID NO: 17322 - DNA, 16 bp, Gossypium hirsutum
ctggtgtttgaataaa

SEQ ID NO: 17323 - DNA, 16 bp, Gossypium hirsutum
ctggtgtttggataaa

SEQ ID NO: 17324 - DNA, 34 bp, Gossypium hirsutum
caggtaatctgccaaataacagaaaattatacag

SEQ ID NO: 17325 - DNA, 29 bp, Gossypium hirsutum
gtttctagtttctttttaccatggcaaga

SEQ ID NO: 17326 - DNA, 15 bp, Gossypium hirsutum
ctcagctctggccct

SEQ ID NO: 17327 - DNA, 14 bp, Gossypium hirsutum
tcagctcgggccct

SEQ ID NO: 17328 - DNA, 22 bp, Gossypium hirsutum
cctttttcaatggcctgtgtga

SEQ ID NO: 17329 - DNA, 25 bp, Gossypium hirsutum
cagatgggaatgccttagttgatga

SEQ ID NO: 17330 - DNA, 16 bp, Gossypium hirsutum
ttcccgagtgttgcag

SEQ ID NO: 17331 - DNA, 17 bp, Gossypium hirsutum
tttcccgagtcttgcag

SEQ ID NO: 17332 - DNA, 25 bp, Gossypium hirsutum
ccattattattctcacgccccatgt

SEQ ID NO: 17333 - DNA, 25 bp, Gossypium hirsutum
gcccattgctgttgtaacattttgt

SEQ ID NO: 17334 - DNA, 22 bp, Gossypium hirsutum
tttcacttataaattgaaatat

SEQ ID NO: 17335 - DNA, 20 bp, Gossypium hirsutum
tcacttataaactgaaatat

SEQ ID NO: 17336 - DNA, 28 bp, Gossypium hirsutum
gctgatctgagacaatctaatggttcaa

SEQ ID NO: 17337 - DNA, 45 bp, Gossypium hirsutum
aattattagtttgagaaaaatataagcctaaaatataggcttaga

SEQ ID NO: 17338 - DNA, 18 bp, Gossypium hirsutum
cgaccttagttaaagttt

SEQ ID NO: 17339 - DNA, 18 bp, Gossypium hirsutum
cgaccttagttaaggttt

SEQ ID NO: 17340 - DNA, 26 bp, Gossypium hirsutum
tcgaaaattcgagttaaacccaggtt

SEQ ID NO: 17341 - DNA, 38 bp, Gossypium hirsutum
catcattttatttttacattttatgtttggagttcgta

SEQ ID NO: 17342 - DNA, 16 bp, Gossypium hirsutum
cacgttgcatttcgga

SEQ ID NO: 17343 - DNA, 16 bp, Gossypium hirsutum
cacgttgcatttcaga

SEQ ID NO: 17344 - DNA, 48 bp, Gossypium hirsutum
gtaattttgatttgatcctattctcacaaattattaatacaattattg

SEQ ID NO: 17345 - DNA, 32 bp, Gossypium hirsutum
ggactatccatcatgattaaccatttttctct

SEQ ID NO: 17346 - DNA, 19 bp, Gossypium hirsutum
agacccaactataatgaca

SEQ ID NO: 17347 - DNA, 16 bp, Gossypium hirsutum
cccaactagaatgaca

SEQ ID NO: 17348 - DNA, 31 bp, Gossypium hirsutum
gctcacattaaaagataactagtacgcttga

SEQ ID NO: 17349 - DNA, 25 bp, Gossypium hirsutum
caaattatacagaaggaggccccag

SEQ ID NO: 17350 - DNA, 20 bp, Gossypium hirsutum
aaaattgttggactagaatt

SEQ ID NO: 17351 - DNA, 17 bp, Gossypium hirsutum
attgttggactggaatt

SEQ ID NO: 17352 - DNA, 27 bp, Gossypium hirsutum
acccaatccatttccaacaattatcct

SEQ ID NO: 17353 - DNA, 27 bp, Gossypium hirsutum
cgtgcttaccaaaaattacttgagtgt

SEQ ID NO: 17354 - DNA, 14 bp, Gossypium hirsutum
cggcttgcgccaag

SEQ ID NO: 17355 - DNA, 16 bp, Gossypium hirsutum
tacggcttacgccaag

SEQ ID NO: 17356 - DNA, 25 bp, Gossypium hirsutum
acggtcagttaatggtatgcaagtt

SEQ ID NO: 17357 - DNA, 25 bp, Gossypium hirsutum
ggctgatttgtaagattgtggcttt

SEQ ID NO: 17358 - DNA, 18 bp, Gossypium hirsutum
tcaaaaaccatttttttc

SEQ ID NO: 17359 - DNA, 17 bp, Gossypium hirsutum
caaaaaccacttttttc

SEQ ID NO: 17360 - DNA, 34 bp, Gossypium hirsutum
ggaaaaaggtcatttcataagcaaatatgtaaga

SEQ ID NO: 17361 - DNA, 33 bp, Gossypium hirsutum
tggttaatttattatgctcggtatttacatggt

SEQ ID NO: 17362 - DNA, 25 bp, Gossypium hirsutum
ctatcctttatttttctaattagtc

SEQ ID NO: 17363 - DNA, 21 bp, Gossypium hirsutum
cctttatttttctgattagtc

SEQ ID NO: 17364 - DNA, 30 bp, Gossypium hirsutum
acaagtagttgtttaagctaaaactgcatg

SEQ ID NO: 17365 - DNA, 25 bp, Gossypium hirsutum
gctagtaaggacattgcctaaggtt

SEQ ID NO: 17366 - DNA, 14 bp, Gossypium hirsutum
ccagtgacaaggca

SEQ ID NO: 17367 - DNA, 13 bp, Gossypium hirsutum
cagtggcaaggca

SEQ ID NO: 17368 - DNA, 25 bp, Gossypium hirsutum
gccaaaactggaggctcaatatgta

SEQ ID NO: 17369 - DNA, 25 bp, Gossypium hirsutum
gcatatgactgacagatgaggaaca

SEQ ID NO: 17370 - DNA, 17 bp, Gossypium hirsutum
atgcctaggtgttgtct

SEQ ID NO: 17371 - DNA, 17 bp, Gossypium hirsutum
atgcctaggtattgtct

SEQ ID NO: 17372 - DNA, 22 bp, Gossypium hirsutum
ggatgccgtgacaagatatggt

SEQ ID NO: 17373 - DNA, 22 bp, Gossypium hirsutum
cggaatgctctagcagttgctt

SEQ ID NO: 17374 - DNA, 20 bp, Gossypium hirsutum
aaagctaaaatgtaaagatg

SEQ ID NO: 17375 - DNA, 18 bp, Gossypium hirsutum
agctaaaatgtgaagatg

SEQ ID NO: 17376 - DNA, 30 bp, Gossypium hirsutum
catgagtagtttgaatacaagtcaatgcaa

SEQ ID NO: 17377 - DNA, 39 bp, Gossypium hirsutum
cccaaactattattcaggtacaaaaacttttattttagt

SEQ ID NO: 17378 - DNA, 24 bp, Gossypium hirsutum
cgattaatacaataaatcaatatt

SEQ ID NO: 17379 - DNA, 24 bp, Gossypium hirsutum
cgattaatacaataaattaatatt

SEQ ID NO: 17380 - DNA, 31 bp, Gossypium hirsutum
tttcactctccttcacatgatcaatttactt

SEQ ID NO: 17381 - DNA, 30 bp, Gossypium hirsutum
catggtcaaaactcaattttctactgtcat

SEQ ID NO: 17382 - DNA, 19 bp, Gossypium hirsutum
ttatcactcctgacagttt

SEQ ID NO: 17383 - DNA, 20 bp, Gossypium hirsutum
attatcactcctaacagttt

SEQ ID NO: 17384 - DNA, 26 bp, Gossypium hirsutum
gactcaaagaaaggagaacagaagga

SEQ ID NO: 17385 - DNA, 25 bp, Gossypium hirsutum
tgaaatcacaacccatgtaggtgtt

SEQ ID NO: 17386 - DNA, 16 bp, Gossypium hirsutum
aattgacacgaaattg

SEQ ID NO: 17387 - DNA, 20 bp, Gossypium hirsutum
ttataattgacatgaaattg

SEQ ID NO: 17388 - DNA, 25 bp, Gossypium hirsutum
ccactccgacaaatgcctatcaatt

SEQ ID NO: 17389 - DNA, 24 bp, Gossypium hirsutum
gttcaaactcatgccggaaagatg

SEQ ID NO: 17390 - DNA, 19 bp, Gossypium hirsutum
tcaacatactgatttcatc

SEQ ID NO: 17391 - DNA, 17 bp, Gossypium hirsutum
aacatactggtttcatc

SEQ ID NO: 17392 - DNA, 25 bp, Gossypium hirsutum
gaagtttaaccaggcaattgtccaa

SEQ ID NO: 17393 - DNA, 29 bp, Gossypium hirsutum
ggtagaaaagtgaaagcagtcagttaaac

SEQ ID NO: 17394 - DNA, 20 bp, Gossypium hirsutum
aacaagtaaagagccatttg

SEQ ID NO: 17395 - DNA, 19 bp, Gossypium hirsutum
acaagtaaagaaccatttg

SEQ ID NO: 17396 - DNA, 25 bp, Gossypium hirsutum
ccacccaggtttcacatctaataca

SEQ ID NO: 17397 - DNA, 23 bp, Gossypium hirsutum
aaagagggccagaccatgaaatt

SEQ ID NO: 17398 - DNA, 20 bp, Gossypium hirsutum
ttttcttacgtcgtattaaa

SEQ ID NO: 17399 - DNA, 20 bp, Gossypium hirsutum
ttttcttacgtcatattaaa

SEQ ID NO: 17400 - DNA, 25 bp, Gossypium hirsutum
ttgtcagccactttgtttcttcaac

SEQ ID NO: 17401 - DNA, 26 bp, Gossypium hirsutum
ccacctcaaattttgttgggacttat

SEQ ID NO: 17402 - DNA, 20 bp, Gossypium hirsutum
ccaatttcctattattttgg

SEQ ID NO: 17403 - DNA, 19 bp, Gossypium hirsutum
caatttcctattgttttgg

SEQ ID NO: 17404 - DNA, 26 bp, Gossypium hirsutum
gttttggactgggtgggagtaattta

SEQ ID NO: 17405 - DNA, 23 bp, Gossypium hirsutum
gtaagaaacaatcgccgcttgat

SEQ ID NO: 17406 - DNA, 20 bp, Gossypium hirsutum
ttctttcactcttttctttg

SEQ ID NO: 17407 - DNA, 18 bp, Gossypium hirsutum
tctttcactctttctttg

SEQ ID NO: 17408 - DNA, 30 bp, Gossypium hirsutum
aaaaaagcgttatttttgaagcagagagat

SEQ ID NO: 17409 - DNA, 33 bp, Gossypium hirsutum; identical to SEQ ID NO: 16349

SEQ ID NO: 17410 - DNA, 25 bp, Gossypium hirsutum
ttagttagagttttttttaatttat

SEQ ID NO: 17411 - DNA, 24 bp, Gossypium hirsutum
ttagttagagtttttttaatttat

SEQ ID NO: 17412 - DNA, 42 bp, Gossypium hirsutum; identical to SEQ ID NO: 16352

SEQ ID NO: 17413 - DNA, 25 bp, Gossypium hirsutum
gcatcatgaatgaaggtaaggcaaa

SEQ ID NO: 17414 - DNA, 21 bp, Gossypium hirsutum
attagtgtactatttgttccc

SEQ ID NO: 17415 - DNA, 20 bp, Gossypium hirsutum
ttagtgtactatttggtccc

SEQ ID NO: 17416 - DNA, 25 bp, Gossypium hirsutum
actgtttttcttgcctagtctgtga

SEQ ID NO: 17417 - DNA, 31 bp, Gossypium hirsutum
aaacatgaaattggtatattttctgctgcaa

SEQ ID NO: 17418 - DNA, 18 bp, Gossypium hirsutum
ccattcctctaagctaat

SEQ ID NO: 17419 - DNA, 17 bp, Gossypium hirsutum
ccattcctctagctaat

SEQ ID NO: 17420 - DNA, 27 bp, Gossypium hirsutum
aaacgtctcttttagctgttttttggg

SEQ ID NO: 17421 - DNA, 25 bp, Gossypium hirsutum
aatcaacgccctttaagttccaaac

SEQ ID NO: 17422 - DNA, 15 bp, Gossypium hirsutum
ccacttccatcaccg

SEQ ID NO: 17423 - DNA, 16 bp, Gossypium hirsutum
cccacttccctcaccg

SEQ ID NO: 17424 - DNA, 31 bp, Gossypium hirsutum
cagaattgagtgaccaatactgtaatttacc

SEQ ID NO: 17425 - DNA, 25 bp, Gossypium hirsutum
gtttctaaagtcttcggtccatcct

SEQ ID NO: 17426 - DNA, 21 bp, Gossypium hirsutum
aactacaacaaatcgtccaag

SEQ ID NO: 17427 - DNA, 19 bp, Gossypium hirsutum
ctacaacaaatcatccaag

SEQ ID NO: 17428 - DNA, 25 bp, Gossypium hirsutum
agccttctgctagtgatttcaatga

SEQ ID NO: 17429 - DNA, 22 bp, Gossypium hirsutum
tggagagccagttggaaatgag

SEQ ID NO: 17430 - DNA, 19 bp, Gossypium hirsutum
cttcttcatacggatacca

SEQ ID NO: 17431 - DNA, 19 bp, Gossypium hirsutum
cttcttcatacggacacca

SEQ ID NO: 17432 - DNA, 25 bp, Gossypium hirsutum
gcgtttgctttatttggcatgctat

SEQ ID NO: 17433 - DNA, 22 bp, Gossypium hirsutum
tggtttagtgaggactcccctt

SEQ ID NO: 17434 - DNA, 19 bp, Gossypium hirsutum
ccatatcttcgtcccttac

SEQ ID NO: 17435 - DNA, 19 bp, Gossypium hirsutum
ccatatcttcctcccttac

SEQ ID NO: 17436 - DNA, 24 bp, Gossypium hirsutum
caagtaacagcttcaacaggcatt

SEQ ID NO: 17437 - DNA, 20 bp, Gossypium hirsutum
ggtcagcattggcaaaagca

SEQ ID NO: 17438 - DNA, 17 bp, Gossypium hirsutum
cacttgttccagcaccg

SEQ ID NO: 17439 - DNA, 16 bp, Gossypium hirsutum
acttgttccggcaccg

SEQ ID NO: 17440 - DNA, 30 bp, Gossypium hirsutum
ttgctcctgttattaaactgtatggaatgt

SEQ ID NO: 17441 - DNA, 33 bp, Gossypium hirsutum
ctcggctcctttaattaattttcacataatacc

SEQ ID NO: 17442 - DNA, 23 bp, Gossypium hirsutum
tttagatatttttttccaatttg

SEQ ID NO: 17443 - DNA, 22 bp, Gossypium hirsutum
tttagatattttttccaatttg

SEQ ID NO: 17444 - DNA, 29 bp, Gossypium hirsutum
aaaagtttgagggtcaagttcaacaaaaa

SEQ ID NO: 17445 - DNA, 30 bp, Gossypium hirsutum
aaaaattgaagattaaggctgctttctgtt

SEQ ID NO: 17446 - DNA, 19 bp, Gossypium hirsutum
cactttcaactccatagtt

SEQ ID NO: 17447 - DNA, 19 bp, Gossypium hirsutum
cactttcaactcaatagtt

SEQ ID NO: 17448 - DNA, 27 bp, Gossypium hirsutum
tcatgtgtcaatccaactatccgaatt

SEQ ID NO: 17449 - DNA, 28 bp, Gossypium hirsutum
ccatgaaaacttaccgttgctacttttt

SEQ ID NO: 17450 - DNA, 20 bp, Gossypium hirsutum
atgttttacatgatgctttt

SEQ ID NO: 17451 - DNA, 20 bp, Gossypium hirsutum
atgttttacatgatactttt

SEQ ID NO: 17452 - DNA, 23 bp, Gossypium hirsutum
ggacattgcttgatcggatgaac

SEQ ID NO: 17453 - DNA, 24 bp, Gossypium hirsutum
ttttcaagttcggcccgaaaaaaa

SEQ ID NO: 17454 - DNA, 18 bp, Gossypium hirsutum
tgttaagttcgaactcag

SEQ ID NO: 17455 - DNA, 19 bp, Gossypium hirsutum
ttgttaagttcgagctcag

SEQ ID NO: 17456 - DNA, 15 bp, Gossypium hirsutum
gtccgggcccaaccc

SEQ ID NO: 17457 - DNA, 25 bp, Gossypium hirsutum
ccaaacctaaccctgaaaatgcttt

SEQ ID NO: 17458 - DNA, 18 bp, Gossypium hirsutum
ttttttcagcttaaaatt

SEQ ID NO: 17459 - DNA, 15 bp, Gossypium hirsutum
tttcagcctaaaatt

SEQ ID NO: 17460 - DNA, 24 bp, Gossypium hirsutum
acggcaggtagggtagtatatgtg

SEQ ID NO: 17461 - DNA, 32 bp, Gossypium hirsutum
caaagacttgatgcaattttgactaaatttca

SEQ ID NO: 17462 - DNA, 15 bp, Gossypium hirsutum
ttgcatgcgcatcta

SEQ ID NO: 17463 - DNA, 15 bp, Gossypium hirsutum
ttgcatgcacatcta

SEQ ID NO: 17464 - DNA, 25 bp, Gossypium hirsutum
gcatcctggttaatgtcttctgtga

SEQ ID NO: 17465 - DNA, 25 bp, Gossypium hirsutum
gatatacatgcattcacccgaggaa

SEQ ID NO: 17466 - DNA, 23 bp, Gossypium hirsutum
ttaagttaccaaataaattactg

SEQ ID NO: 17467 - DNA, 21 bp, Gossypium hirsutum
aagttaccaaataaatgactg

SEQ ID NO: 17468 - DNA, 21 bp, Gossypium hirsutum
acttccgggaaccttttgaca

SEQ ID NO: 17469 - DNA, 33 bp, Gossypium hirsutum
cctgagaacaattacaattttaaactacatgca

SEQ ID NO: 17470 - DNA, 19 bp, Gossypium hirsutum
atgttacaagaataaattt

SEQ ID NO: 17471 - DNA, 20 bp, Gossypium hirsutum
catgttacaagaattaattt

SEQ ID NO: 17472 - DNA, 25 bp, Gossypium hirsutum
cttgtatgcgtcaaacataggtgtt

SEQ ID NO: 17473 - DNA, 28 bp, Gossypium hirsutum
cagtatgcccagtggtatattacaatct

SEQ ID NO: 17474 - DNA, 20 bp, Gossypium hirsutum
acttctttatgtaattcttg

SEQ ID NO: 17475 - DNA, 18 bp, Gossypium hirsutum
ttctttatgtgattcttg

SEQ ID NO: 17476 - DNA, 21 bp, Gossypium hirsutum
ccccaacctccagttatcagt

SEQ ID NO: 17477 - DNA, 27 bp, Gossypium hirsutum
caaaccttgtgagactacaaacatgaa

SEQ ID NO: 17478 - DNA, 16 bp, Gossypium hirsutum
ctgattacagaaattc

SEQ ID NO: 17479 - DNA, 16 bp, Gossypium hirsutum
ctgattactgaaattc

SEQ ID NO: 17480 - DNA, 33 bp, Gossypium hirsutum
gttgtggttgtataaaagactaacatgaaatca

SEQ ID NO: 17481 - DNA, 36 bp, Gossypium hirsutum
tgaaagataaatttaacttccagaatccttttctct

SEQ ID NO: 17482 - DNA, 14 bp, Gossypium hirsutum
tcttcccaacttcc

SEQ ID NO: 17483 - DNA, 15 bp, Gossypium hirsutum
ctcttcccgacttcc

SEQ ID NO: 17484 - DNA, 27 bp, Gossypium hirsutum
ggtgaggatggattatgcaggtaaata

SEQ ID NO: 17485 - DNA, 19 bp, Gossypium hirsutum
tggcatggcccttttgcta

SEQ ID NO: 17486 - DNA, 19 bp, Gossypium hirsutum
cctagctaacgtgtcacat

SEQ ID NO: 17487 - DNA, 19 bp, Gossypium hirsutum
cctagctaacttgtcacat

SEQ ID NO: 17488 - DNA, 24 bp, Gossypium hirsutum
cagcgggaaagcatactcataagt

SEQ ID NO: 17489 - DNA, 23 bp, Gossypium hirsutum
ggttatccgctcaagcctaaagg

SEQ ID NO: 17490 - DNA, 13 bp, Gossypium hirsutum
cttggccaaaatt

SEQ ID NO: 17491 - DNA, 13 bp, Gossypium hirsutum
cttggccgaaatt

SEQ ID NO: 17492 - DNA, 25 bp, Gossypium hirsutum
gctcgtttttcgggcctaatatttt

SEQ ID NO: 17493 - DNA, 31 bp, Gossypium hirsutum
tgattagcgtgtgagatatgatctttcaaat

SEQ ID NO: 17494 - DNA, 21 bp, Gossypium hirsutum
aaatacgggtatatgcccaag

SEQ ID NO: 17495 - DNA, 21 bp, Gossypium hirsutum
aaatacgggtatatacccaag

SEQ ID NO: 17496 - DNA, 25 bp, Gossypium hirsutum
ttggaggatcctgcaactatgaatc

SEQ ID NO: 17497 - DNA, 24 bp, Gossypium hirsutum
gtgacggcttgtgattattttcgt

SEQ ID NO: 17498 - DNA, 18 bp, Gossypium hirsutum
aatcctttcccagtccgt

SEQ ID NO: 17499 - DNA, 17 bp, Gossypium hirsutum
atcctttcccggtccgt

SEQ ID NO: 17500 - DNA, 25 bp, Gossypium hirsutum
tctttaccgcttacatttccaccaa

SEQ ID NO: 17501 - DNA, 27 bp, Gossypium hirsutum
gccattgcttttcattttcacataggt

SEQ ID NO: 17502 - DNA, 18 bp, Gossypium hirsutum
aagaccaaagtcgatcat

SEQ ID NO: 17503 - DNA, 15 bp, Gossypium hirsutum
accaaagtcaatcat

SEQ ID NO: 17504 - DNA, 26 bp, Gossypium hirsutum
ggaatgtgttgatgtgaactgtctct

SEQ ID NO: 17505 - DNA, 27 bp, Gossypium hirsutum
acagacacagtccttcaagaaaaatga

SEQ ID NO: 17506 - DNA, 15 bp, Gossypium hirsutum
ttgcttgtcaatcaa

SEQ ID NO: 17507 - DNA, 15 bp, Gossypium hirsutum
ttgcttgacaatcaa

SEQ ID NO: 17508 - DNA, 28 bp, Gossypium hirsutum
aatcacaaagtggtaatccttctttcca

SEQ ID NO: 17509 - DNA, 26 bp, Gossypium hirsutum
tgccttcaacttcactttccttactt

SEQ ID NO: 17510 - DNA, 19 bp, Gossypium hirsutum
tttctggtttgtttcaatc

SEQ ID NO: 17511 - DNA, 16 bp, Gossypium hirsutum
ctggtttgattcaatc

SEQ ID NO: 17512 - DNA, 33 bp, Gossypium hirsutum
aggaatttaactgagataatattttgtctcgct

SEQ ID NO: 17513 - DNA, 26 bp, Gossypium hirsutum
tcacatttcatctttgactccccaaa

SEQ ID NO: 17514 - DNA, 17 bp, Gossypium hirsutum
aatgccattcaacttaa

SEQ ID NO: 17515 - DNA, 16 bp, Gossypium hirsutum
atgccattcgacttaa

SEQ ID NO: 17516 - DNA, 24 bp, Gossypium hirsutum
ggtgtacgtgtctgatctctcatc

SEQ ID NO: 17517 - DNA, 27 bp, Gossypium hirsutum
acgactattaactttgctgatgtgtca

SEQ ID NO: 17518 - DNA, 16 bp, Gossypium hirsutum
tgtggattgcaacgtg

SEQ ID NO: 17519 - DNA, 17 bp, Gossypium hirsutum
atgtggattgcgacgtg

SEQ ID NO: 17520 - DNA, 26 bp, Gossypium hirsutum
atgcctgttaactttgtagacgtgat

SEQ ID NO: 17521 - DNA, 26 bp, Gossypium hirsutum
ggactagaaactgtaggttcggaatt

SEQ ID NO: 17522 - DNA, 24 bp, Gossypium hirsutum
cactcaatatttataggtacttaa

SEQ ID NO: 17523 - DNA, 24 bp, Gossypium hirsutum
cactcaatatttatagatacttaa

SEQ ID NO: 17524 - DNA, 45 bp, Gossypium hirsutum
cttaaccaatgtatccattcatgacaataatttattattatcata

SEQ ID NO: 17525 - DNA, 25 bp, Gossypium hirsutum
aggtgcatgataatgagccaaagtt

SEQ ID NO: 17526 - DNA, 15 bp, Gossypium hirsutum
tctgtccagctcttc

SEQ ID NO: 17527 - DNA, 15 bp, Gossypium hirsutum
tctgtccaactcttc

SEQ ID NO: 17528 - DNA, 23 bp, Gossypium hirsutum
ccctcaaagcttcacttttgctt

SEQ ID NO: 17529 - DNA, 28 bp, Gossypium hirsutum
acttggttttgggtatctagtgactact

SEQ ID NO: 17530 - DNA, 18 bp, Gossypium hirsutum
ccaaatgatgggactaag

SEQ ID NO: 17531 - DNA, 17 bp, Gossypium hirsutum
caaatgatggaactaag

SEQ ID NO: 17532 - DNA, 26 bp, Gossypium hirsutum
aactgcatggttaaggaagagaagtt

SEQ ID NO: 17533 - DNA, 25 bp, Gossypium hirsutum
atcacccaaactaattggcccaata

SEQ ID NO: 17534 - DNA, 23 bp, Gossypium hirsutum
aattctactaactctattatttc

SEQ ID NO: 17535 - DNA, 20 bp, Gossypium hirsutum
tctactaactctgttatttc

SEQ ID NO: 17536 - DNA, 30 bp, Gossypium hirsutum
gtgtatcagaatccgtcacgtatatttaca

SEQ ID NO: 17537 - DNA, 24 bp, Gossypium hirsutum
cgcttcatcaaatacaaggccttt

SEQ ID NO: 17538 - DNA, 19 bp, Gossypium hirsutum
tttagcagaatgatttgtt

SEQ ID NO: 17539 - DNA, 18 bp, Gossypium hirsutum
ttagcagaatggtttgtt

SEQ ID NO: 17540 - DNA, 29 bp, Gossypium hirsutum
gaggctaagatatgtattacgagagcaaa

SEQ ID NO: 17541 - DNA, 29 bp, Gossypium hirsutum
tgaggaactatcttctttttgctgtttga

SEQ ID NO: 17542 - DNA, 18 bp, Gossypium hirsutum
attcacatagccactcct

SEQ ID NO: 17543 - DNA, 20 bp, Gossypium hirsutum
aaattcacataaccactcct

SEQ ID NO: 17544 - DNA, 42 bp, Gossypium hirsutum
tgcatatttccttttatatagcctacatattttattggttaa

SEQ ID NO: 17545 - DNA, 33 bp, Gossypium hirsutum
agcaagttttacacctttttcaatttagtcttt

SEQ ID NO: 17546 - DNA, 20 bp, Gossypium hirsutum
tttcgttgaaatattttaac

SEQ ID NO: 17547 - DNA, 17 bp, Gossypium hirsutum
cgttgaaagattttaac

SEQ ID NO: 17548 - DNA, 25 bp, Gossypium hirsutum
ggtaacgggacctcgtttctataaa

SEQ ID NO: 17549 - DNA, 25 bp, Gossypium hirsutum
ggaggaaagacaccttaggtaacct

SEQ ID NO: 17550 - DNA, 18 bp, Gossypium hirsutum
tctcagcttttgttgacc

SEQ ID NO: 17551 - DNA, 17 bp, Gossypium hirsutum
ctcagctttagttgacc

SEQ ID NO: 17552 - DNA, 20 bp, Gossypium hirsutum
acttaccaggcacggaacac

SEQ ID NO: 17553 - DNA, 32 bp, Gossypium hirsutum
agactatcatgaaaacatcttttgtagctgat

SEQ ID NO: 17554 - DNA, 20 bp, Gossypium hirsutum
aactaagcacatgtcattta

SEQ ID NO: 17555 - DNA, 17 bp, Gossypium hirsutum
taagcacatgccattta

SEQ ID NO: 17556 - DNA, 31 bp, Gossypium hirsutum
tcagcataattgttagaatccttcttttcca

SEQ ID NO: 17557 - DNA, 35 bp, Gossypium hirsutum
gggattactatcaattatcatttgtaagtgtcact

SEQ ID NO: 17558 - DNA, 21 bp, Gossypium hirsutum
aagtaactcgtatgatgacca

SEQ ID NO: 17559 - DNA, 22 bp, Gossypium hirsutum
aaagtaactcgtataatgacca

SEQ ID NO: 17560 - DNA, 28 bp, Gossypium hirsutum
acgcaagcttgtttctattaatcaatcg

SEQ ID NO: 17561 - DNA, 25 bp, Gossypium hirsutum
ggaggatcttcggtgtttaaactca

SEQ ID NO: 17562 - DNA, 17 bp, Gossypium hirsutum
caagtgcctcaagagaa

SEQ ID NO: 17563 - DNA, 17 bp, Gossypium hirsutum
caagtgcctcacgagaa

SEQ ID NO: 17564 - DNA, 25 bp, Gossypium hirsutum
gaaactggatgtacaggatgatggt

SEQ ID NO: 17565 - DNA, 25 bp, Gossypium hirsutum
ctagagtaccacctgttgatccaat

SEQ ID NO: 17566 - DNA, 19 bp, Gossypium hirsutum
cctcttcccttaccgatat

SEQ ID NO: 17567 - DNA, 18 bp, Gossypium hirsutum
ctcttcccctaccgatat

SEQ ID NO: 17568 - DNA, 25 bp, Gossypium hirsutum
ggaacactgagttacagtccatctg

SEQ ID NO: 17569 - DNA, 26 bp, Gossypium hirsutum
gcaaggaggacttaaaagaagagact

SEQ ID NO: 17570 - DNA, 22 bp, Gossypium hirsutum
cacaatagaaatttgtatcatc

SEQ ID NO: 17571 - DNA, 20 bp, Gossypium hirsutum
caatagaaatgtgtatcatc

SEQ ID NO: 17572 - DNA, 25 bp, Gossypium hirsutum
gaaaagcgtaattgtgaccagtcat

SEQ ID NO: 17573 - DNA, 44 bp, Gossypium hirsutum
tcttttcttatgatataactaagatgtaaatttatatgcttgct

SEQ ID NO: 17574 - DNA, 17 bp, Gossypium hirsutum
cctgaaaatacaaaatt

SEQ ID NO: 17575 - DNA, 17 bp, Gossypium hirsutum
cctgaaaatagaaaatt

SEQ ID NO: 17576 - DNA, 44 bp, Gossypium hirsutum
cttaagcattaatcatttaatttaacctttttagtcatttgaat

SEQ ID NO: 17577 - DNA, 25 bp, Gossypium hirsutum
gtcctgtggtctttctgatgtatca

SEQ ID NO: 17578 - DNA, 21 bp, Gossypium hirsutum
tttcgctattttcactgtctt

SEQ ID NO: 17579 - DNA, 19 bp, Gossypium hirsutum
tcgctattttcactatctt

SEQ ID NO: 17580 - DNA, 18 bp, Gossypium hirsutum
tcgcccctcactctgtct

SEQ ID NO: 17581 - DNA, 28 bp, Gossypium hirsutum
ctttttccattggagagagagagagaag

SEQ ID NO: 17582 - DNA, 17 bp, Gossypium hirsutum
tgattagttgaaatttc

SEQ ID NO: 17583 - DNA, 18 bp, Gossypium hirsutum
ttgattagttgatatttc

SEQ ID NO: 17584 - DNA, 27 bp, Gossypium hirsutum
gggaccacttttcttttaattgttgga

SEQ ID NO: 17585 - DNA, 34 bp, Gossypium hirsutum
aaaaccttgtagtataaagacttcttatgatgca

SEQ ID NO: 17586 - DNA, 21 bp, Gossypium hirsutum
ctaaatatttcaagagcactc

SEQ ID NO: 17587 - DNA, 21 bp, Gossypium hirsutum
ctaaatatttcaagagtactc

SEQ ID NO: 17588 - DNA, 35 bp, Gossypium hirsutum
tgtcgtgtttagaatataacacatgataattgagt

SEQ ID NO: 17589 - DNA, 25 bp, Gossypium hirsutum
ggatatcttgaccgatgaactgcaa

SEQ ID NO: 17590 - DNA, 17 bp, Gossypium hirsutum
ttcactaaggcaattag

SEQ ID NO: 17591 - DNA, 17 bp, Gossypium hirsutum
ttcactaagccaattag

SEQ ID NO: 17592 - DNA, 30 bp, Gossypium hirsutum
tcattttcagcaatttccttttccttttct

SEQ ID NO: 17593 - DNA, 22 bp, Gossypium hirsutum
gtggtgaggtggtttacagtct

SEQ ID NO: 17594 - DNA, 14 bp, Gossypium hirsutum
cagccggcagtact

SEQ ID NO: 17595 - DNA, 14 bp, Gossypium hirsutum
cagccggctgtact

SEQ ID NO: 17596 - DNA, 27 bp, Gossypium hirsutum
agctacctgcttaatctttggctaaaa

SEQ ID NO: 17597 - DNA, 24 bp, Gossypium hirsutum
aattgacaatttgaagcccagcag

SEQ ID NO: 17598 - DNA, 15 bp, Gossypium hirsutum
catgccagacccaaa

SEQ ID NO: 17599 - DNA, 14 bp, Gossypium hirsutum
atgccaggcccaaa

SEQ ID NO: 17600 - DNA, 21 bp, Gossypium hirsutum
ttctccggcagatccaagttg

SEQ ID NO: 17601 - DNA, 22 bp, Gossypium hirsutum
ggcgatgaatctgcctctcaaa

SEQ ID NO: 17602 - DNA, 20 bp, Gossypium hirsutum
caatgggtacttttcaattt

SEQ ID NO: 17603 - DNA, 20 bp, Gossypium hirsutum
caatgggtacttttcgattt

SEQ ID NO: 17604 - DNA, 43 bp, Gossypium hirsutum
gattgaagataattgcagatattgatattcgaattttaaatct

SEQ ID NO: 17605 - DNA, 25 bp, Gossypium hirsutum
gcatctgtctcatttttcgtcacaa

SEQ ID NO: 17606 - DNA, 14 bp, Gossypium hirsutum
cttcggagtcaccc

SEQ ID NO: 17607 - DNA, 14 bp, Gossypium hirsutum
cttccgagtcaccc

SEQ ID NO: 17608 - DNA, 28 bp, Gossypium hirsutum
tccgggtaatggaaaatttaatccttca

SEQ ID NO: 17609 - DNA, 24 bp, Gossypium hirsutum
gatctgcttcatttcttgcttcgt

SEQ ID NO: 17610 - DNA, 18 bp, Gossypium hirsutum
ctttggttatcagatgcg

SEQ ID NO: 17611 - DNA, 17 bp, Gossypium hirsutum
tttggttatcggatgcg

SEQ ID NO: 17612 - DNA, 32 bp, Gossypium hirsutum
ccaaagaaaagatgaagacaaaaagaaagaca

SEQ ID NO: 17613 - DNA, 27 bp, Gossypium hirsutum
gcatctaataacaccatgcatctgtgt

SEQ ID NO: 17614 - DNA, 21 bp, Gossypium hirsutum
atggtttttttttgtgcttat

SEQ ID NO: 17615 - DNA, 20 bp, Gossypium hirsutum
atggttttttttgtgcttat

SEQ ID NO: 17616 - DNA, 30 bp, Gossypium hirsutum
tgcccataaagaaacaaaaggtaaatttca

SEQ ID NO: 17617 - DNA, 29 bp, Gossypium hirsutum
ttgtgctttcattttgttacttcagttgt

SEQ ID NO: 17618 - DNA, 18 bp, Gossypium hirsutum
cacccttatgttattgct

SEQ ID NO: 17619 - DNA, 17 bp, Gossypium hirsutum
cacccttatgtattgct

SEQ ID NO: 17620 - DNA, 30 bp, Gossypium hirsutum
gtttaggctggagcaaaaaatatatatgca

SEQ ID NO: 17621 - DNA, 27 bp, Gossypium hirsutum
ggaattgaggaagttattggtctggaa

SEQ ID NO: 17622 - DNA, 18 bp, Gossypium hirsutum
aacaatttcacgttcttg

SEQ ID NO: 17623 - DNA, 17 bp, Gossypium hirsutum
acaatttcacattcttg

SEQ ID NO: 17624 - DNA, 30 bp, Gossypium hirsutum
tttcaaccctctatcttccttcttatctct

SEQ ID NO: 17625 - DNA, 25 bp, Gossypium hirsutum
aactagggtatgcacacaagcaata

SEQ ID NO: 17626 - DNA, 16 bp, Gossypium hirsutum
ttccattgcattggac

SEQ ID NO: 17627 - DNA, 17 bp, Gossypium hirsutum
cttccattacattggac

SEQ ID NO: 17628 - DNA, 25 bp, Gossypium hirsutum
cagcgaaagtcttccgtacctataa

SEQ ID NO: 17629 - DNA, 23 bp, Gossypium hirsutum
caaataggccttggccaaacatg

SEQ ID NO: 17630 - DNA, 25 bp, Gossypium hirsutum
cttagaaaaacatttgaatcccaaa

SEQ ID NO: 17631 - DNA, 24 bp, Gossypium hirsutum
ttagaaaaacatttgaatctcaaa

SEQ ID NO: 17632 - DNA, 25 bp, Gossypium hirsutum
gcaaaggaggattcagtgaggttta

SEQ ID NO: 17633 - DNA, 30 bp, Gossypium hirsutum
agctagttgtaaataggcttgattgtttga

SEQ ID NO: 17634 - DNA, 23 bp, Gossypium hirsutum
acccttaaactataattaaaata

SEQ ID NO: 17635 - DNA, 21 bp, Gossypium hirsutum
ccttaaactataactaaaata

SEQ ID NO: 17636 - DNA, 35 bp, Gossypium hirsutum
ctccttcgtttaacttttattaagatgatgacatg

SEQ ID NO: 17637 - DNA, 26 bp, Gossypium hirsutum
gcttggtgttaaaaaaccctctagct

SEQ ID NO: 17638 - DNA, 21 bp, Gossypium hirsutum
ccaatttaacaatcatattag

SEQ ID NO: 17639 - DNA, 22 bp, Gossypium hirsutum
accaatttaacaatcctattag

SEQ ID NO: 17640 - DNA, 27 bp, Gossypium hirsutum
ggcatttccattttttctcttctcctt

SEQ ID NO: 17641 - DNA, 31 bp, Gossypium hirsutum
gtgtgttgattagcatttttctctacactac

SEQ ID NO: 17642 - DNA, 15 bp, Gossypium hirsutum
atcggcaatttccca

SEQ ID NO: 17643 - DNA, 13 bp, Gossypium hirsutum
cggcgatttccca

SEQ ID NO: 17644 - DNA, 24 bp, Gossypium hirsutum
ggccaatgtcttcttttgtttgct

SEQ ID NO: 17645 - DNA, 40 bp, Gossypium hirsutum
ctacaaatatctcgacaatttttatattaacccattgaaa

SEQ ID NO: 17646 - DNA, 23 bp, Gossypium hirsutum
ctaaaatttctagaaaaaaatag

SEQ ID NO: 17647 - DNA, 21 bp, Gossypium hirsutum
taaaatttctagaaaaaatag

SEQ ID NO: 17648 - DNA, 24 bp, Gossypium hirsutum
ggctattcccatttctcctcacat

SEQ ID NO: 17649 - DNA, 28 bp, Gossypium hirsutum
ccgttattcaattcattgtttcaagcca

SEQ ID NO: 17650 - DNA, 22 bp, Gossypium hirsutum
attgacagataatatcattttg

SEQ ID NO: 17651 - DNA, 18 bp, Gossypium hirsutum
acagataatgtcattttg

SEQ ID NO: 17652 - DNA, 34 bp, Gossypium hirsutum
cctccatgttgtatcaaattggacaataaataat

SEQ ID NO: 17653 - DNA, 24 bp, Gossypium hirsutum
tcggaactttcagcactacaagtg

SEQ ID NO: 17654 - DNA, 15 bp, Gossypium hirsutum
tgcctttgttttttc

SEQ ID NO: 17655 - DNA, 14 bp, Gossypium hirsutum
tgcctttgtttttc

SEQ ID NO: 17656 - DNA, 19 bp, Gossypium hirsutum
gccatgcctgctcttcact

SEQ ID NO: 17657 - DNA, 25 bp, Gossypium hirsutum
tggctttggctgataaatgaacact

SEQ ID NO: 17658 - DNA, 14 bp, Gossypium hirsutum
agccgggattatgt

SEQ ID NO: 17659 - DNA, 16 bp, Gossypium hirsutum
ttagccgagattatgt

SEQ ID NO: 17660 - DNA, 25 bp, Gossypium hirsutum
ctgggtacgagctgtttttaacaat

SEQ ID NO: 17661 - DNA, 33 bp, Gossypium hirsutum
gcagatatcaaaataaaaactgaaaagcgctta

SEQ ID NO: 17662 - DNA, 16 bp, Gossypium hirsutum
ttgtcttgaaaatttt

SEQ ID NO: 17663 - DNA, 17 bp, Gossypium hirsutum
cttgtcttgaaagtttt

SEQ ID NO: 17664 - DNA, 25 bp, Gossypium hirsutum
gcagcaagccactgttattttaagt

SEQ ID NO: 17665 - DNA, 30 bp, Gossypium hirsutum
actttcaatcttgattctgtttttgcttgt

SEQ ID NO: 17666 - DNA, 23 bp, Gossypium hirsutum
catttggtatcatactatactat

SEQ ID NO: 17667 - DNA, 23 bp, Gossypium hirsutum
catttggtatcatactctactat

SEQ ID NO: 17668 - DNA, 25 bp, Gossypium hirsutum
cctttgatgctatactagggcaagt

SEQ ID NO: 17669 - DNA, 32 bp, Gossypium hirsutum
tccaataactatcattctgcaaactattctgt

SEQ ID NO: 17670 - DNA, 16 bp, Gossypium hirsutum
tcgagcatcgcaagga

SEQ ID NO: 17671 - DNA, 15 bp, Gossypium hirsutum
cgagcatcacaagga

SEQ ID NO: 17672 - DNA, 26 bp, Gossypium hirsutum
ccactactggtttcaatcaagccata

SEQ ID NO: 17673 - DNA, 29 bp, Gossypium hirsutum
caagaagaagaagaagaagacgaagaaga

SEQ ID NO: 17674 - DNA, 18 bp, Gossypium hirsutum
aaggagaatcatattaac

SEQ ID NO: 17675 - DNA, 17 bp, Gossypium hirsutum
aggagattcatattaac

SEQ ID NO: 17676 - DNA, 27 bp, Gossypium hirsutum
ttccgagaagaaaaagggagaaaagat

SEQ ID NO: 17677 - DNA, 32 bp, Gossypium hirsutum
catgtaatcgaattacattttgactcacttgt

SEQ ID NO: 17678 - DNA, 24 bp, Gossypium hirsutum
aaatgttaatttacttaatttttt

SEQ ID NO: 17679 - DNA, 21 bp, Gossypium hirsutum
tgttaatttacttaaattttt

SEQ ID NO: 17680 - DNA, 28 bp, Gossypium hirsutum
tgaagtttgatgggttggaagttagatt

SEQ ID NO: 17681 - DNA, 34 bp, Gossypium hirsutum
tgtcaaatgtaatatgattttatgagcaattgca

SEQ ID NO: 17682 - DNA, 18 bp, Gossypium hirsutum
ttgacaacatgatttcaa

SEQ ID NO: 17683 - DNA, 19 bp, Gossypium hirsutum
cttgacaacataatttcaa

SEQ ID NO: 17684 - DNA, 21 bp, Gossypium hirsutum
agcaaccttaatcgcctgcat

SEQ ID NO: 17685 - DNA, 27 bp, Gossypium hirsutum
ccatgaatagtaaaaggtcgactggat

SEQ ID NO: 17686 - DNA, 18 bp, Gossypium hirsutum
cacctgcaaatcgtacaa

SEQ ID NO: 17687 - DNA, 18 bp, Gossypium hirsutum
cacctgcaaattgtacaa

SEQ ID NO: 17688 - DNA, 17 bp, Gossypium hirsutum
tcgtggcaagcgctgaa

SEQ ID NO: 17689 - DNA, 26 bp, Gossypium hirsutum
aaatttgacgccacaacctttttagt

SEQ ID NO: 17690 - DNA, 23 bp, Gossypium hirsutum
atctttatctacttattaacctc

SEQ ID NO: 17691 - DNA, 20 bp, Gossypium hirsutum
tttatctacttatgaacctc

SEQ ID NO: 17692 - DNA, 28 bp, Gossypium hirsutum
gcagagtttcacttaaatatcccaggaa

SEQ ID NO: 17693 - DNA, 30 bp, Gossypium hirsutum
agcataacgtatcataaagattccaacaca

SEQ ID NO: 17694 - DNA, 23 bp, Gossypium hirsutum
ttacaatactgtttatgttaatg

SEQ ID NO: 17695 - DNA, 21 bp, Gossypium hirsutum
acaatactgattatgttaatg

SEQ ID NO: 17696 - DNA, 25 bp, Gossypium hirsutum
ggtttgtccgtctgtgctatagtag

SEQ ID NO: 17697 - DNA, 28 bp, Gossypium hirsutum
ccatgccataagtgatatgatgtagtca

SEQ ID NO: 17698 - DNA, 19 bp, Gossypium hirsutum
actttgtgacatttcaatg

SEQ ID NO: 17699 - DNA, 18 bp, Gossypium hirsutum
ctttgtgacatgtcaatg

SEQ ID NO: 17700 - DNA, 25 bp, Gossypium hirsutum
gaaaggaacgcttcatgccatattt

SEQ ID NO: 17701 - DNA, 25 bp, Gossypium hirsutum
cctaaaccaacagggaacactagaa

SEQ ID NO: 17702 - DNA, 20 bp, Gossypium hirsutum
attcattgtctaaacatttt

SEQ ID NO: 17703 - DNA, 19 bp, Gossypium hirsutum
ttcattgactaaacatttt

SEQ ID NO: 17704 - DNA, 18 bp, Gossypium hirsutum
ccccaagttggccattcc

SEQ ID NO: 17705 - DNA, 32 bp, Gossypium hirsutum
cctattaatgaaaagaatctttgtgcatgaca

SEQ ID NO: 17706 - DNA, 15 bp, Gossypium hirsutum
aaaccccgataaatt

SEQ ID NO: 17707 - DNA, 14 bp, Gossypium hirsutum
aacccccataaatt

SEQ ID NO: 17708 - DNA, 22 bp, Gossypium hirsutum
gctcgatccttcagtcaatgga

SEQ ID NO: 17709 - DNA, 25 bp, Gossypium hirsutum
cacagcacactctagcttttgtttt

SEQ ID NO: 17710 - DNA, 20 bp, Gossypium hirsutum
ccattatgagtaacaactaa

SEQ ID NO: 17711 - DNA, 19 bp, Gossypium hirsutum
cattatgagttacaactaa

SEQ ID NO: 17712 - DNA, 29 bp, Gossypium hirsutum
ccttttttacaaagtagttgcatgaacca

SEQ ID NO: 17713 - DNA, 20 bp, Gossypium hirsutum
tggatgttgggtgccattgt

SEQ ID NO: 17714 - DNA, 15 bp, Gossypium hirsutum
acaacctagaaaccg

SEQ ID NO: 17715 - DNA, 16 bp, Gossypium hirsutum
aacaacctacaaaccg

SEQ ID NO: 17716 - DNA, 22 bp, Gossypium hirsutum
ggcccagaacaaagaaaacgaa

SEQ ID NO: 17717 - DNA, 27 bp, Gossypium hirsutum
ctgtaaggcctgtaagaatatcgtgaa

SEQ ID NO: 17718 - DNA, 16 bp, Gossypium hirsutum
cggtggtcttgtgcat

SEQ ID NO: 17719 - DNA, 17 bp, Gossypium hirsutum
acggtggtcttgtacat

SEQ ID NO: 17720 - DNA, 31 bp, Gossypium hirsutum
actagaatttatgtaagttccgggattttgt

SEQ ID NO: 17721 - DNA, 25 bp, Gossypium hirsutum
acatgcgtgtataaacgagtcacat

SEQ ID NO: 17722 - DNA, 19 bp, Gossypium hirsutum
attaaactccataataacc

SEQ ID NO: 17723 - DNA, 14 bp, Gossypium hirsutum
actccgtaataacc

SEQ ID NO: 17724 - DNA, 33 bp, Gossypium hirsutum
acatatggtggtaaagaagtctatagttcaaga

SEQ ID NO: 17725 - DNA, 23 bp, Gossypium hirsutum
cccccgttaaccatcatttgtga

SEQ ID NO: 17726 - DNA, 18 bp, Gossypium hirsutum
atttccccctatttatct

SEQ ID NO: 17727 - DNA, 17 bp, Gossypium hirsutum
tttccccctttttatct

SEQ ID NO: 17728 - DNA, 35 bp, Gossypium hirsutum
ttccacttttttctcccataattctctaaatacat

SEQ ID NO: 17729 - DNA, 22 bp, Gossypium hirsutum
ccgcagactccactagctttat

SEQ ID NO: 17730 - DNA, 16 bp, Gossypium hirsutum
cccttgaagaaggact

SEQ ID NO: 17731 - DNA, 16 bp, Gossypium hirsutum
cccttgaaaaaggact

SEQ ID NO: 17732 - DNA, 25 bp, Gossypium hirsutum
tgattttcttcacgaggctggattt

SEQ ID NO: 17733 - DNA, 25 bp, Gossypium hirsutum
gcaacatgccgaggataattttgag

SEQ ID NO: 17734 - DNA, 15 bp, Gossypium hirsutum
agcttgcatctcatc

SEQ ID NO: 17735 - DNA, 16 bp, Gossypium hirsutum
cagctttcatctcatc

SEQ ID NO: 17736 - DNA, 25 bp, Gossypium hirsutum
aaggccagagaaaagatgatttgga

SEQ ID NO: 17737 - DNA, 24 bp, Gossypium hirsutum
gtgtatgcaaaagcaaaggaatgc

SEQ ID NO: 17738 - DNA, 16 bp, Gossypium hirsutum
ctcagcagagagtatg

SEQ ID NO: 17739 - DNA, 15 bp, Gossypium hirsutum
tcagcagaaagtatg

SEQ ID NO: 17740 - DNA, 26 bp, Gossypium hirsutum
aagtgcttagcaagcaaaatagcaaa

SEQ ID NO: 17741 - DNA, 28 bp, Gossypium hirsutum
ggcgagacaagaaagaattagaaatcag

SEQ ID NO: 17742 - DNA, 19 bp, Gossypium hirsutum
ctcgcatactacagtatat

SEQ ID NO: 17743 - DNA, 20 bp, Gossypium hirsutum
actcgcatactatagtatat

SEQ ID NO: 17744 - DNA, 25 bp, Gossypium hirsutum
tgcgttttcctgttgtcttcttaca

SEQ ID NO: 17745 - DNA, 25 bp, Gossypium hirsutum
tcatggtgcaagggaggatatctta

SEQ ID NO: 17746 - DNA, 20 bp, Gossypium hirsutum
catcttcaaagtagactaca

SEQ ID NO: 17747 - DNA, 19 bp, Gossypium hirsutum
atcttcaaagtaaactaca

SEQ ID NO: 17748 - DNA, 26 bp, Gossypium hirsutum
catggccacattgctatgtttgttat

SEQ ID NO: 17749 - DNA, 28 bp, Gossypium hirsutum
ttccattactagcatctgaaagttgtca

SEQ ID NO: 17750 - DNA, 21 bp, Gossypium hirsutum
atattagccctctatgaacaa

SEQ ID NO: 17751 - DNA, 20 bp, Gossypium hirsutum
atattagccctctataacaa

SEQ ID NO: 17752 - DNA, 26 bp, Gossypium hirsutum
cgtaagttccaacatgaatcgactga

SEQ ID NO: 17753 - DNA, 44 bp, Gossypium hirsutum
tcattatatcaatttaggagttaaatgttatttcttttgtcttg

SEQ ID NO: 17754 - DNA, 17 bp, Gossypium hirsutum
tttagcggcaatgtcaa

SEQ ID NO: 17755 - DNA, 17 bp, Gossypium hirsutum
tttagcggcagtgtcaa

SEQ ID NO: 17756 - DNA, 18 bp, Gossypium hirsutum
cgatagccagcccggaag

SEQ ID NO: 17757 - DNA, 25 bp, Gossypium hirsutum
cgtgcatagcactaatgtggagtat

SEQ ID NO: 17758 - DNA, 14 bp, Gossypium hirsutum
cttggtggaaaatg

SEQ ID NO: 17759 - DNA, 14 bp, Gossypium hirsutum
cttggtagaaaatg

SEQ ID NO: 17760 - DNA, 42 bp, Gossypium hirsutum
aaaattaactcaatataaaactccaacctcaattttatcaat

SEQ ID NO: 17761 - DNA, 30 bp, Gossypium hirsutum
acgtaactgttgtttaacagactaactgaa

SEQ ID NO: 17762 - DNA, 20 bp, Gossypium hirsutum
cagttgttataacggttact

SEQ ID NO: 17763 - DNA, 20 bp, Gossypium hirsutum
cagttgttataacagttact

SEQ ID NO: 17764 - DNA, 23 bp, Gossypium hirsutum
acacaaacaagcagagggaatgt

SEQ ID NO: 17765 - DNA, 30 bp, Gossypium hirsutum
ctcaccatcaaataaaattacagctcacaa

SEQ ID NO: 17766 - DNA, 19 bp, Gossypium hirsutum
cagaatttctaagcaatgc

SEQ ID NO: 17767 - DNA, 18 bp, Gossypium hirsutum
cagaatttctaagaatgc

SEQ ID NO: 17768 - DNA, 26 bp, Gossypium hirsutum
cctagatggagatcttgaaaggcaaa

SEQ ID NO: 17769 - DNA, 30 bp, Gossypium hirsutum
ggaccttgttcttttctattagaacttgca

SEQ ID NO: 17770 - DNA, 17 bp, Gossypium hirsutum
cttagcggttgtttgtt

SEQ ID NO: 17771 - DNA, 17 bp, Gossypium hirsutum
cttagcggttatttgtt

SEQ ID NO: 17772 - DNA, 35 bp, Gossypium hirsutum
agttaccattttcataatggtcttccattaatctt

SEQ ID NO: 17773 - DNA, 26 bp, Gossypium hirsutum
ccgaaaggttagcattgacaaatgaa

SEQ ID NO: 17774 - DNA, 17 bp, Gossypium hirsutum
catagcgtatgtaaaac

SEQ ID NO: 17775 - DNA, 17 bp, Gossypium hirsutum
catagcgtatataaaac

SEQ ID NO: 17776 - DNA, 25 bp, Gossypium hirsutum
ctgctgaatccacttggtatccatt

SEQ ID NO: 17777 - DNA, 21 bp, Gossypium hirsutum
gtcacccaagaacggtttgtg

SEQ ID NO: 17778 - DNA, 17 bp, Gossypium hirsutum
ttgcaatcaccgccggt

SEQ ID NO: 17779 - DNA, 14 bp, Gossypium hirsutum
caatcgccgccggt

SEQ ID NO: 17780 - DNA, 24 bp, Gossypium hirsutum
gttatcatcccatacccgtttggt

SEQ ID NO: 17781 - DNA, 25 bp, Gossypium hirsutum
tgttggatgtgatgatggctttaga

SEQ ID NO: 17782 - DNA, 22 bp, Gossypium hirsutum
tgatataaagctaagagcaatg

SEQ ID NO: 17783 - DNA, 20 bp, Gossypium hirsutum
atataaagctaagggcaatg

SEQ ID NO: 17784 - DNA, 25 bp, Gossypium hirsutum
gcctgttctagctgaatccataagc

SEQ ID NO: 17785 - DNA, 22 bp, Gossypium hirsutum
tttggtagtggaaggcctgaac

SEQ ID NO: 17786 - DNA, 18 bp, Gossypium hirsutum
ctcaccttccccctgatg

SEQ ID NO: 17787 - DNA, 18 bp, Gossypium hirsutum
ctcaccttcctcctgatg

SEQ ID NO: 17788 - DNA, 22 bp, Gossypium hirsutum
gtgtacaatcaggaggcaaacc

SEQ ID NO: 17789 - DNA, 33 bp, Gossypium hirsutum
acccacactaattatattgacaaaacattagct

SEQ ID NO: 17790 - DNA, 25 bp, Gossypium hirsutum
tgacattaatagagataataaagta

SEQ ID NO: 17791 - DNA, 23 bp, Gossypium hirsutum
acattaatagagataaaaaagta

SEQ ID NO: 17792 - DNA, 25 bp, Gossypium hirsutum
cacccgcactaacactcttaatttg

SEQ ID NO: 17793 - DNA, 34 bp, Gossypium hirsutum
agctttcagggatttttaagaattcaataattgg

SEQ ID NO: 17794 - DNA, 21 bp, Gossypium hirsutum
ttaggtctagattaataaaag

SEQ ID NO: 17795 - DNA, 21 bp, Gossypium hirsutum
ttaggtctagattattaaaag

SEQ ID NO: 17796 - DNA, 28 bp, Gossypium hirsutum
agtgactcaagggtaaaaatgtatggtt

SEQ ID NO: 17797 - DNA, 25 bp, Gossypium hirsutum
ggcaggcttctattaataccgaaac

SEQ ID NO: 17798 - DNA, 17 bp, Gossypium hirsutum
caatttcagcgtacggc

SEQ ID NO: 17799 - DNA, 17 bp, Gossypium hirsutum
caatttcagcatacggc

SEQ ID NO: 17800 - DNA, 18 bp, Gossypium hirsutum
cgccgatcccgaaaacac

SEQ ID NO: 17801 - DNA, 23 bp, Gossypium hirsutum
ccaagcatagttgagccaagtca

SEQ ID NO: 17802 - DNA, 22 bp, Gossypium hirsutum
ctatgctttacagaaatatgta

SEQ ID NO: 17803 - DNA, 20 bp, Gossypium hirsutum
atgctttacagaaacatgta

SEQ ID NO: 17804 - DNA, 25 bp, Gossypium hirsutum
ccatgaaggtgagctagcatacttt

SEQ ID NO: 17805 - DNA, 30 bp, Gossypium hirsutum
gcatgtattgtaggataaattggacaactg

SEQ ID NO: 17806 - DNA, 22 bp, Gossypium hirsutum
ccttaagcttatttacatatat

SEQ ID NO: 17807 - DNA, 22 bp, Gossypium hirsutum
ccttaagcttatttccatatat

SEQ ID NO: 17808 - DNA, 25 bp, Gossypium hirsutum
gcatggttttttgttgtgtttgtgt

SEQ ID NO: 17809 - DNA, 29 bp, Gossypium hirsutum
acatccaaaagccgtttcaatttatttca

SEQ ID NO: 17810 - DNA, 20 bp, Gossypium hirsutum
ccattatctacctgtttggt

SEQ ID NO: 17811 - DNA, 20 bp, Gossypium hirsutum
ccattatctacctatttggt

SEQ ID NO: 17812 - DNA, 35 bp, Gossypium hirsutum
catagtttatgttgtacttattagtgactgatcca

SEQ ID NO: 17813 - DNA, 25 bp, Gossypium hirsutum
cccaaagatgcacatcaatttctga

SEQ ID NO: 17814 - DNA, 19 bp, Gossypium hirsutum
cactatagggccttaatat

SEQ ID NO: 17815 - DNA, 17 bp, Gossypium hirsutum
ctatagggcctgaatat

SEQ ID NO: 17816 - DNA, 25 bp, Gossypium hirsutum
aaaagtgcaatctgccacatcaaat

SEQ ID NO: 17817 - DNA, 23 bp, Gossypium hirsutum
aggttcatgagaagtccccattg

SEQ ID NO: 17818 - DNA, 20 bp, Gossypium hirsutum
cagaggtagaagatgcagat

SEQ ID NO: 17819 - DNA, 20 bp, Gossypium hirsutum
cagaggtagaagatacagat

SEQ ID NO: 17820 - DNA, 31 bp, Gossypium hirsutum
gacacaaagtgcaaatgatatcgtatacaat

SEQ ID NO: 17821 - DNA, 19 bp, Gossypium hirsutum
accgggtagtcctcatgca

SEQ ID NO: 17822 - DNA, 14 bp, Gossypium hirsutum
agaccagaaagcac

SEQ ID NO: 17823 - DNA, 14 bp, Gossypium hirsutum
agaccaaaaagcac

SEQ ID NO: 17824 - DNA, 40 bp, Gossypium hirsutum
agaattcagtactattgagaaaaatatatacacagttgag

SEQ ID NO: 17825 - DNA, 33 bp, Gossypium hirsutum
acaagattgttccaaatggtaatatacctcttt

SEQ ID NO: 17826 - DNA, 15 bp, Gossypium hirsutum
tcacaagggaaaata

SEQ ID NO: 17827 - DNA, 18 bp, Gossypium hirsutum
taatcacaagagaaaata

SEQ ID NO: 17828 - DNA, 36 bp, Gossypium hirsutum
aggtttagaatttcaattactagatgctacagaaag

SEQ ID NO: 17829 - DNA, 26 bp, Gossypium hirsutum
cacttcctttttctcctgacttacca

SEQ ID NO: 17830 - DNA, 13 bp, Gossypium hirsutum
cccctcggattct

SEQ ID NO: 17831 - DNA, 15 bp, Gossypium hirsutum
aacccctctgattct

SEQ ID NO: 17832 - DNA, 29 bp, Gossypium hirsutum
agctatattgtaagccgaagtaagagaga

SEQ ID NO: 17833 - DNA, 22 bp, Gossypium hirsutum
caacaacctgctttaccgtcat

SEQ ID NO: 17834 - DNA, 18 bp, Gossypium hirsutum
ctcaagtcatgtatcatt

SEQ ID NO: 17835 - DNA, 16 bp, Gossypium hirsutum
caagtcatgcatcatt

SEQ ID NO: 17836 - DNA, 25 bp, Gossypium hirsutum
cacagcttgaatcccaagaaacaaa

SEQ ID NO: 17837 - DNA, 22 bp, Gossypium hirsutum
gcctaaacgagcaccccttatt

SEQ ID NO: 17838 - DNA, 16 bp, Gossypium hirsutum
cagcttccattcccgg

SEQ ID NO: 17839 - DNA, 16 bp, Gossypium hirsutum
cagcttccatccccgg

SEQ ID NO: 17840 - DNA, 21 bp, Gossypium hirsutum
ccttgatagccgccttcttca

SEQ ID NO: 17841 - DNA, 30 bp, Gossypium hirsutum
gcagaaggtcaatttcagtaggttatatga

SEQ ID NO: 17842 - DNA, 17 bp, Gossypium hirsutum
tcacatacccgatttga

SEQ ID NO: 17843 - DNA, 16 bp, Gossypium hirsutum
cacatacccaatttga

SEQ ID NO: 17844 - DNA, 27 bp, Gossypium hirsutum
acagagcaaagcacatttttaaaacgt

SEQ ID NO: 17845 - DNA, 27 bp, Gossypium hirsutum
ggattttagatgccagtttaacgtgat

SEQ ID NO: 17846 - DNA, 24 bp, Gossypium hirsutum
cattatatccataaaataaatatg

SEQ ID NO: 17847 - DNA, 19 bp, Gossypium hirsutum
tatccataaaagaaatatg

SEQ ID NO: 17848 - DNA, 31 bp, Gossypium hirsutum
cagtagaaatgaagtatgtggtcttagttga

SEQ ID NO: 17849 - DNA, 30 bp, Gossypium hirsutum
cttgacaattaagtttcaactcctcaaaca

SEQ ID NO: 17850 - DNA, 18 bp, Gossypium hirsutum
agttgagtgaccagagac

SEQ ID NO: 17851 - DNA, 16 bp, Gossypium hirsutum
ttgagtgaccggagac

SEQ ID NO: 17852 - DNA, 25 bp, Gossypium hirsutum
agcgcacttgtaattcactatctgt

SEQ ID NO: 17853 - DNA, 31 bp, Gossypium hirsutum
gcaagtacatttatgaagaaaagttgaacca

SEQ ID NO: 17854 - DNA, 22 bp, Gossypium hirsutum
ccagaactactttaggtgagag

SEQ ID NO: 17855 - DNA, 21 bp, Gossypium hirsutum
cagaactactttaagtgagag

SEQ ID NO: 17856 - DNA, 24 bp, Gossypium hirsutum
tctcgagccaaaatctttcaaggt

SEQ ID NO: 17857 - DNA, 38 bp, Gossypium hirsutum
tgaatatagtatttgtgctttaaaaatgttcaatgtga

SEQ ID NO: 17858 - DNA, 19 bp, Gossypium hirsutum
ttattgtacttgaactttc

SEQ ID NO: 17859 - DNA, 22 bp, Gossypium hirsutum
ttattattgtacttgtactttc

SEQ ID NO: 17860 - DNA, 38 bp, Gossypium hirsutum
ggatattttaaagtatcactaccacattagacatgtta

SEQ ID NO: 17861 - DNA, 29 bp, Gossypium hirsutum
caaaacccaaacaatgaatacaagaggaa

SEQ ID NO: 17862 - DNA, 24 bp, Gossypium hirsutum
atccataaatttgtaatacccttt

SEQ ID NO: 17863 - DNA, 22 bp, Gossypium hirsutum
ccataaatttgtaataaccttt

SEQ ID NO: 17864 - DNA, 30 bp, Gossypium hirsutum
ccaatcacgaatccagtatttattttcact

SEQ ID NO: 17865 - DNA, 22 bp, Gossypium hirsutum
gcttctacgggtgagtttggat

SEQ ID NO: 17866 - DNA, 14 bp, Gossypium hirsutum
cgcaggtaaataca

SEQ ID NO: 17867 - DNA, 14 bp, Gossypium hirsutum
cgcaggtaaacaca

SEQ ID NO: 17868 - DNA, 23 bp, Gossypium hirsutum
tgacgctacagtatcgctacagt

SEQ ID NO: 17869 - DNA, 25 bp, Gossypium hirsutum
tgtcccatcaatccaaagagagaga

SEQ ID NO: 17870 - DNA, 26 bp, Gossypium hirsutum
tatttttctaacttttaatttttttc

SEQ ID NO: 17871 - DNA, 21 bp, Gossypium hirsutum
tttctaacttttaattttttc

SEQ ID NO: 17872 - DNA, 21 bp, Gossypium hirsutum
ccgtcactgtttctcggttga

SEQ ID NO: 17873 - DNA, 22 bp, Gossypium hirsutum
gcttgagcctttttggaacctt

SEQ ID NO: 17874 - DNA, 18 bp, Gossypium hirsutum
ctggaatactcggatgtt

SEQ ID NO: 17875 - DNA, 17 bp, Gossypium hirsutum
tggaatactcagatgtt

SEQ ID NO: 17876 - DNA, 27 bp, Gossypium hirsutum
tgatgttactgtaattctctggtgcaa

SEQ ID NO: 17877 - DNA, 25 bp, Gossypium hirsutum
tttggaatcgactgcaatgatgttg

SEQ ID NO: 17878 - DNA, 18 bp, Gossypium hirsutum
ctcgcacatatcgttagt

SEQ ID NO: 17879 - DNA, 17 bp, Gossypium hirsutum
tcgcacatatcattagt

SEQ ID NO: 17880 - DNA, 25 bp, Gossypium hirsutum
ccaatcagcgtttcgaagacatttt

SEQ ID NO: 17881 - DNA, 21 bp, Gossypium hirsutum
ggccaagcaagacatgcatat

SEQ ID NO: 17882 - DNA, 16 bp, Gossypium hirsutum
acaggacaagaatatt

SEQ ID NO: 17883 - DNA, 16 bp, Gossypium hirsutum
acaggacaaaaatatt

SEQ ID NO: 17884 - DNA, 27 bp, Gossypium hirsutum
gtaaaggtgattggttacaccatacca

SEQ ID NO: 17885 - DNA, 27 bp, Gossypium hirsutum
tcaccaacaataatagtccaaatgggt

SEQ ID NO: 17886 - DNA, 17 bp, Gossypium hirsutum
atctaaaccaaagaaac

SEQ ID NO: 17887 - DNA, 18 bp, Gossypium hirsutum
catctaaacctaagaaac

SEQ ID NO: 17888 - DNA, 25 bp, Gossypium hirsutum
tgtgttcttaggctttgctacatga

SEQ ID NO: 17889 - DNA, 30 bp, Gossypium hirsutum
accatgaaatatcaccgattcttagagaga

SEQ ID NO: 17890 - DNA, 13 bp, Gossypium hirsutum
ctgcacggaatct

SEQ ID NO: 17891 - DNA, 13 bp, Gossypium hirsutum
ctgcacagaatct

SEQ ID NO: 17892 - DNA, 23 bp, Gossypium hirsutum
gccatctgtcaacctggaatgat

SEQ ID NO: 17893 - DNA, 25 bp, Gossypium hirsutum
ccatccattccaacaatcaactgaa

SEQ ID NO: 17894 - DNA, 24 bp, Gossypium hirsutum
atcttattatcttgtagtttattc

SEQ ID NO: 17895 - DNA, 23 bp, Gossypium hirsutum
tcttattatcttgtaatttattc

SEQ ID NO: 17896 - DNA, 24 bp, Gossypium hirsutum
tcatgtataactccagcagtggga

SEQ ID NO: 17897 - DNA, 30 bp, Gossypium hirsutum
gcaatttgagtataagagaatcccaacttt

SEQ ID NO: 17898 - DNA, 15 bp, Gossypium hirsutum
ttgcccccagagtga

SEQ ID NO: 17899 - DNA, 14 bp, Gossypium hirsutum
tgcccccggagtga

SEQ ID NO: 17900 - DNA, 25 bp, Gossypium hirsutum
agcaaatcagggaccatctgttaaa

SEQ ID NO: 17901 - DNA, 26 bp, Gossypium hirsutum
tcacattgctcataagcatagctcat

SEQ ID NO: 17902 - DNA, 20 bp, Gossypium hirsutum
accttactagtatggaaaag

SEQ ID NO: 17903 - DNA, 18 bp, Gossypium hirsutum
cttactagtgtggaaaag

SEQ ID NO: 17904 - DNA, 22 bp, Gossypium hirsutum
gcggccattttcctgtttatca

SEQ ID NO: 17905 - DNA, 25 bp, Gossypium hirsutum
ggatcaaagtcgaaagcatcatacg

SEQ ID NO: 17906 - DNA, 14 bp, Gossypium hirsutum
cttggacaaattct

SEQ ID NO: 17907 - DNA, 13 bp, Gossypium hirsutum
ttggacgaattct

SEQ ID NO: 17908 - DNA, 24 bp, Gossypium hirsutum
ctaaggcgagaggttgtcaagtac

SEQ ID NO: 17909 - DNA, 32 bp, Gossypium hirsutum
caagcagtgaatgaaaatttgatgaattagga

SEQ ID NO: 17910 - DNA, 17 bp, Gossypium hirsutum
catagcccaaagtttat

SEQ ID NO: 17911 - DNA, 16 bp, Gossypium hirsutum
catagcccaagtttat

SEQ ID NO: 17912 - DNA, 27 bp, Gossypium hirsutum
gctgtatgctgctattaaattgtcaca

SEQ ID NO: 17913 - DNA, 33 bp, Gossypium hirsutum
tcttggttttgcaagaaatggagaatatataga

SEQ ID NO: 17914 - DNA, 18 bp, Gossypium hirsutum
ctaccatctctatcatcc

SEQ ID NO: 17915 - DNA, 18 bp, Gossypium hirsutum
ctaccatctatatcatcc

SEQ ID NO: 17916 - DNA, 22 bp, Gossypium hirsutum
gcatccacaatcagaccatcga

SEQ ID NO: 17917 - DNA, 28 bp, Gossypium hirsutum
tgcgaagagataagatgttttagttgct

SEQ ID NO: 17918 - DNA, 19 bp, Gossypium hirsutum
acaataatccataactgcg

SEQ ID NO: 17919 - DNA, 18 bp, Gossypium hirsutum
caataatccataaccgcg

SEQ ID NO: 17920 - DNA, 26 bp, Gossypium hirsutum
tcgtatcatttccagctcagtctttt

SEQ ID NO: 17921 - DNA, 31 bp, Gossypium hirsutum
tgcaagataggttggacataaaaaagttact

SEQ ID NO: 17922 - DNA, 17 bp, Gossypium hirsutum
aagaaaacagagaaatt

SEQ ID NO: 17923 - DNA, 17 bp, Gossypium hirsutum
aagaaaacaaagaaatt

SEQ ID NO: 17924 - DNA, 25 bp, Gossypium hirsutum
gccaaaaacagaaaacagcagatga

SEQ ID NO: 17925 - DNA, 25 bp, Gossypium hirsutum
gatcaagaatggagggtgatgatga

SEQ ID NO: 17926 - DNA, 16 bp, Gossypium hirsutum
cagccacaacagtcaa

SEQ ID NO: 17927 - DNA, 16 bp, Gossypium hirsutum
cagccacaactgtcaa

SEQ ID NO: 17928 - DNA, 25 bp, Gossypium hirsutum
agtgatggtacattgttgggtcatg

SEQ ID NO: 17929 - DNA, 24 bp, Gossypium hirsutum
agcatccaacctaagctcaattgt

SEQ ID NO: 17930 - DNA, 19 bp, Gossypium hirsutum
ttccagaagtcttatattc

SEQ ID NO: 17931 - DNA, 17 bp, Gossypium hirsutum
tccagaagtctatattc

SEQ ID NO: 17932 - DNA, 25 bp, Gossypium hirsutum
cgtagtgttatcccacatcagttga

SEQ ID NO: 17933 - DNA, 23 bp, Gossypium hirsutum
ccatgtcagaggactacgtctac

SEQ ID NO: 17934 - DNA, 25 bp, Gossypium hirsutum
aggagataataataataataaaaaa

SEQ ID NO: 17935 - DNA, 26 bp, Gossypium hirsutum
aaggagataataataataataataaa

SEQ ID NO: 17936 - DNA, 38 bp, Gossypium hirsutum
atgtaatgtaatgtatgtaggtataatatgcttttgct

SEQ ID NO: 17937 - DNA, 33 bp, Gossypium hirsutum
agttgcggaattaatttttatcctctaatttgg

SEQ ID NO: 17938 - DNA, 24 bp, Gossypium hirsutum
ttaattttagtctatataattttc

SEQ ID NO: 17939 - DNA, 24 bp, Gossypium hirsutum
ttaattttagtctatatacttttc

SEQ ID NO: 17940 - DNA, 30 bp, Gossypium hirsutum
ggtagaatttgaccaattgctatcatttga

SEQ ID NO: 17941 - DNA, 23 bp, Gossypium hirsutum
tgccagacaagtatcgcaagatc

SEQ ID NO: 17942 - DNA, 21 bp, Gossypium hirsutum
ttcatttggttactttcaagc

SEQ ID NO: 17943 - DNA, 20 bp, Gossypium hirsutum
tcatttggttactctcaagc

SEQ ID NO: 17944 - DNA, 25 bp, Gossypium hirsutum
gcctgatattgcgtatgcagtaaac

SEQ ID NO: 17945 - DNA, 25 bp, Gossypium hirsutum
cgtcgaatctatacgctgaaactca

SEQ ID NO: 17946 - DNA, 16 bp, Gossypium hirsutum
catgacggttcgatcc

SEQ ID NO: 17947 - DNA, 16 bp, Gossypium hirsutum
catgacgattcgatcc

SEQ ID NO: 17948 - DNA, 21 bp, Gossypium hirsutum
caacggcagaaaccgaattgg

SEQ ID NO: 17949 - DNA, 18 bp, Gossypium hirsutum
acactagccgccctacca

SEQ ID NO: 17950 - DNA, 18 bp, Gossypium hirsutum
ctagtacaagcattccca

SEQ ID NO: 17951 - DNA, 18 bp, Gossypium hirsutum
ctagtacaagccttccca

SEQ ID NO: 17952 - DNA, 25 bp, Gossypium hirsutum
ccctttatccatggtcagagcatta

SEQ ID NO: 17953 - DNA, 28 bp, Gossypium hirsutum
accggtgttttgttctaaaagataacca

SEQ ID NO: 17954 - DNA, 15 bp, Gossypium hirsutum
ccccacccctgaagg

SEQ ID NO: 17955 - DNA, 15 bp, Gossypium hirsutum
ccccacccttgaagg

SEQ ID NO: 17956 - DNA, 29 bp, Gossypium hirsutum
gctcgattacttttggtgttgaatttgat

SEQ ID NO: 17957 - DNA, 20 bp, Gossypium hirsutum
agaggttgctgctgctaagg

SEQ ID NO: 17958 - DNA, 19 bp, Gossypium hirsutum
tcgaatgtttgttaataag

SEQ ID NO: 17959 - DNA, 19 bp, Gossypium hirsutum
tcgaatgtttgttgataag

SEQ ID NO: 17960 - DNA, 32 bp, Gossypium hirsutum
ttaataaagcaagactacatacttccatctgg

SEQ ID NO: 17961 - DNA, 26 bp, Gossypium hirsutum
ccaacgtatcaatctcaacctcttca

SEQ ID NO: 17962 - DNA, 15 bp, Gossypium hirsutum
aagaacgctaacgcc

SEQ ID NO: 17963 - DNA, 16 bp, Gossypium hirsutum
caagaactctaacgcc

SEQ ID NO: 17964 - DNA, 24 bp, Gossypium hirsutum
ggatcgtggtgttgacttttgact

SEQ ID NO: 17965 - DNA, 18 bp, Gossypium hirsutum
ccgcctgcagcacctaaa

SEQ ID NO: 17966 - DNA, 18 bp, Gossypium hirsutum
ttctgcttcggtcacaaa

SEQ ID NO: 17967 - DNA, 19 bp, Gossypium hirsutum
tttctgcttcgttcacaaa

SEQ ID NO: 17968 - DNA, 41 bp, Gossypium hirsutum
gtgagtattgagaactaaagcgtattattatactagttaaa

SEQ ID NO: 17969 - DNA, 26 bp, Gossypium hirsutum
gagggaattaaactagcatgggagaa

SEQ ID NO: 17970 - DNA, 21 bp, Gossypium hirsutum
catttttaagacaatttttta

SEQ ID NO: 17971 - DNA, 21 bp, Gossypium hirsutum
catttttaagacaaattttta

SEQ ID NO: 17972 - DNA, 29 bp, Gossypium hirsutum
gttttaatctcgagtctgaccaactaaca

SEQ ID NO: 17973 - DNA, 28 bp, Gossypium hirsutum
tggagtatagagtgagtgtacatgttca

SEQ ID NO: 17974 - DNA, 18 bp, Gossypium hirsutum
ccaaaacaacccctttat

SEQ ID NO: 17975 - DNA, 18 bp, Gossypium hirsutum
ccaaaacaatccctttat

SEQ ID NO: 17976 - DNA, 24 bp, Gossypium hirsutum
agaacccgaccaatgtagagtcta

SEQ ID NO: 17977 - DNA, 29 bp, Gossypium hirsutum
ggtgatagatgtgctggaaagtaatagat

SEQ ID NO: 17978 - DNA, 17 bp, Gossypium hirsutum
actaaccaagggttcat

SEQ ID NO: 17979 - DNA, 17 bp, Gossypium hirsutum
actaaccaagcgttcat

SEQ ID NO: 17980 - DNA, 28 bp, Gossypium hirsutum
cttcctgaactcttatccattgaatcct

SEQ ID NO: 17981 - DNA, 28 bp, Gossypium hirsutum
gctgccatgttatattttcttagccatt

SEQ ID NO: 17982 - DNA, 25 bp, Gossypium hirsutum
cattagtagtattataaagtttaac

SEQ ID NO: 17983 - DNA, 24 bp, Gossypium hirsutum
attagtagtattatagagtttaac

SEQ ID NO: 17984 - DNA, 24 bp, Gossypium hirsutum
tgagggccactttgaataccatac

SEQ ID NO: 17985 - DNA, 29 bp, Gossypium hirsutum
tcaaaaccaaattgctactagtattccga

SEQ ID NO: 17986 - DNA, 20 bp, Gossypium hirsutum
aaaatgatgaaactggattt

SEQ ID NO: 17987 - DNA, 20 bp, Gossypium hirsutum
aaaatgatgaaaatggattt

SEQ ID NO: 17988 - DNA, 44 bp, Gossypium hirsutum
agatatatttttggatttcttttactttgtatattatgtccgat

SEQ ID NO: 17989 - DNA, 25 bp, Gossypium hirsutum
cagtcctgaaaactccacacttaga

SEQ ID NO: 17990 - DNA, 17 bp, Gossypium hirsutum
ccttgtaccatatccca

SEQ ID NO: 17991 - DNA, 16 bp, Gossypium hirsutum
cttgtaccaaatccca

SEQ ID NO: 17992 - DNA, 24 bp, Gossypium hirsutum
cccaaacaactgctttcacatcaa

SEQ ID NO: 17993 - DNA, 34 bp, Gossypium hirsutum
tgaatcaagttttaagtttatctaatgtggaggt

SEQ ID NO: 17994 - DNA, 23 bp, Gossypium hirsutum
atgataagatgataattcaatcg

SEQ ID NO: 17995 - DNA, 22 bp, Gossypium hirsutum
tgataagatgataatttaatcg

SEQ ID NO: 17996 - DNA, 27 bp, Gossypium hirsutum
gtatccttctaattaaggccgagttca

SEQ ID NO: 17997 - DNA, 35 bp, Gossypium hirsutum
acggtttgatttactaaaataacaatttttggtct

SEQ ID NO: 17998 - DNA, 19 bp, Gossypium hirsutum
attcaagaaatgagtttcg

SEQ ID NO: 17999 - DNA, 16 bp, Gossypium hirsutum
caagaaatgggtttcg

SEQ ID NO: 18000 - DNA, 20 bp, Gossypium hirsutum
atccttcctcgtgcgtaacc

SEQ ID NO: 18001 - DNA, 24 bp, Gossypium hirsutum
tgagaggaaaaagggcgaagaaaa

SEQ ID NO: 18002 - DNA, 25 bp, Gossypium hirsutum
cgtaagaaagaaaaaaaaatagtta

SEQ ID NO: 18003 - DNA, 24 bp, Gossypium hirsutum
cgtaagaaagaaaaaaaatagtta

SEQ ID NO: 18004 - DNA, 45 bp, Gossypium hirsutum
ctatttttatacttctataatttgtttttactttcttagcccatt

SEQ ID NO: 18005 - DNA, 25 bp, Gossypium hirsutum
ggagccggatcaacattcatatcaa

SEQ ID NO: 18006 - DNA, 18 bp, Gossypium hirsutum
ttcgcccaaatttatcaa

SEQ ID NO: 18007 - DNA, 16 bp, Gossypium hirsutum
cgcccaaaattatcaa

SEQ ID NO: 18008 - DNA, 24 bp, Gossypium hirsutum
ggattcccccaaccatgaataagg

SEQ ID NO: 18009 - DNA, 32 bp, Gossypium hirsutum
gaaattcagagagatcggatagatctttttct

SEQ ID NO: 18010 - DNA, 17 bp, Gossypium hirsutum
atgaaggcccttatacc

SEQ ID NO: 18011 - DNA, 19 bp, Gossypium hirsutum
aatatgaaggccttatacc

SEQ ID NO: 18012 - DNA, 29 bp, Gossypium hirsutum
agtagtggctaaaatgcaattcgattact

SEQ ID NO: 18013 - DNA, 25 bp, Gossypium hirsutum
acaagtttcaacttctccctgagtt

SEQ ID NO: 18014 - DNA, 21 bp, Gossypium hirsutum
aaggtgatttttttgttaatt

SEQ ID NO: 18015 - DNA, 20 bp, Gossypium hirsutum
aaggtgattttttgttaatt

SEQ ID NO: 18016 - DNA, 32 bp, Gossypium hirsutum
cccataattcagttcaagaatgaaaacatctt

SEQ ID NO: 18017 - DNA, 25 bp, Gossypium hirsutum
tccacagcaacaactaaagaatcca

SEQ ID NO: 18018 - DNA, 22 bp, Gossypium hirsutum
tacttcatgatagatgtttact

SEQ ID NO: 18019 - DNA, 22 bp, Gossypium hirsutum
tacttcatgataaatgtttact

SEQ ID NO: 18020 - DNA, 25 bp, Gossypium hirsutum
ccgagacatgattaaaagccattga

SEQ ID NO: 18021 - DNA, 17 bp, Gossypium hirsutum
ttggctcggcccgaatt

SEQ ID NO: 18022 - DNA, 23 bp, Gossypium hirsutum
cataatagtaaaatggtaacaaa

SEQ ID NO: 18023 - DNA, 24 bp, Gossypium hirsutum
acataatagtaaaatgataacaaa

SEQ ID NO: 18024 - DNA, 27 bp, Gossypium hirsutum
gctcggttttggttcgattcaaaaatt

SEQ ID NO: 18025 - DNA, 24 bp, Gossypium hirsutum
cggattgccaagtctgaagaaaac

SEQ ID NO: 18026 - DNA, 15 bp, Gossypium hirsutum
cagttcccgactttg

SEQ ID NO: 18027 - DNA, 16 bp, Gossypium hirsutum
acagttccccactttg

SEQ ID NO: 18028 - DNA, 27 bp, Gossypium hirsutum
tgctaagtaacaaagagtcactcgttt

SEQ ID NO: 18029 - DNA, 26 bp, Gossypium hirsutum
caaaagtcaaaagcaaaaccattgca

SEQ ID NO: 18030 - DNA, 21 bp, Gossypium hirsutum
ttaagagaattgaaggataac

SEQ ID NO: 18031 - DNA, 19 bp, Gossypium hirsutum
aagagaattgatggataac

SEQ ID NO: 18032 - DNA, 27 bp, Gossypium hirsutum
tgatggtttgaagggttcaatatgaca

SEQ ID NO: 18033 - DNA, 22 bp, Gossypium hirsutum
gaaagtggcagcagagtgtcta

SEQ ID NO: 18034 - DNA, 16 bp, Gossypium hirsutum
catttcgtggctccac

SEQ ID NO: 18035 - DNA, 16 bp, Gossypium hirsutum
catttcgaggctccac

SEQ ID NO: 18036 - DNA, 25 bp, Gossypium hirsutum
tccaagggaatctgcaatttcaagt

SEQ ID NO: 18037 - DNA, 24 bp, Gossypium hirsutum
gacagaagggcctatgttattggt

SEQ ID NO: 18038 - DNA, 16 bp, Gossypium hirsutum
tcaggcagatcataag

SEQ ID NO: 18039 - DNA, 15 bp, Gossypium hirsutum
caggcaggtcataag

SEQ ID NO: 18040 - DNA, 25 bp, Gossypium hirsutum
cttgataaagctgcgatttcatgca

SEQ ID NO: 18041 - DNA, 37 bp, Gossypium hirsutum
agatgtattctttaatcttatactggctattgtgttc

SEQ ID NO: 18042 - DNA, 19 bp, Gossypium hirsutum
atcttctttgaaatttcag

SEQ ID NO: 18043 - DNA, 18 bp, Gossypium hirsutum
tcttctttgaactttcag

SEQ ID NO: 18044 - DNA, 27 bp, Gossypium hirsutum
tcaacagacattctgtgttaagagcat

SEQ ID NO: 18045 - DNA, 30 bp, Gossypium hirsutum
caaaaaggagagaaaaggaaggaaaatgaa

SEQ ID NO: 18046 - DNA, 16 bp, Gossypium hirsutum
cacagcatgcctgttt

SEQ ID NO: 18047 - DNA, 18 bp, Gossypium hirsutum
ttcacagcatacctgttt

SEQ ID NO: 18048 - DNA, 28 bp, Gossypium hirsutum
ctcaaaagtcttttctttccctcactct

SEQ ID NO: 18049 - DNA, 30 bp, Gossypium hirsutum
catgtcatttcaatgctttagttgtaggaa

SEQ ID NO: 18050 - DNA, 22 bp, Gossypium hirsutum
ctctgaatgatttaaggtatac

SEQ ID NO: 18051 - DNA, 22 bp, Gossypium hirsutum
ctctgaatgatttaaagtatac

SEQ ID NO: 18052 - DNA, 31 bp, Gossypium hirsutum
acaattaatcatcctaatctatgtgcaacca

SEQ ID NO: 18053 - DNA, 23 bp, Gossypium hirsutum
tcatgggcaatcactaacaagca

SEQ ID NO: 18054 - DNA, 19 bp, Gossypium hirsutum
actagttccaatcagttcc

SEQ ID NO: 18055 - DNA, 17 bp, Gossypium hirsutum
ctagttccaacagttcc

SEQ ID NO: 18056 - DNA, 26 bp, Gossypium hirsutum
caaacaagctgaaagaacagtttcga

SEQ ID NO: 18057 - DNA, 25 bp, Gossypium hirsutum
cccgggaaatggtaagtttcgtaaa

SEQ ID NO: 18058 - DNA, 15 bp, Gossypium hirsutum
ccggtttgaccaaag

SEQ ID NO: 18059 - DNA, 15 bp, Gossypium hirsutum
ccggtttgcccaaag

SEQ ID NO: 18060 - DNA, 25 bp, Gossypium hirsutum
acacctgaatgttatgctacatgca

SEQ ID NO: 18061 - DNA, 42 bp, Gossypium hirsutum
gtatttcttttcaccttataagttttttcttttccttaatct

SEQ ID NO: 18062 - DNA, 15 bp, Gossypium hirsutum
caggttgcggtattg

SEQ ID NO: 18063 - DNA, 17 bp, Gossypium hirsutum
ctcaggttgctgtattg

SEQ ID NO: 18064 - DNA, 34 bp, Gossypium hirsutum
cagatcaggttcctatatcttcatactcaatagt

SEQ ID NO: 18065 - DNA, 29 bp, Gossypium hirsutum
tggtgaatatgaaaagaactcttgtccat

SEQ ID NO: 18066 - DNA, 25 bp, Gossypium hirsutum
tttagcacaaatttatatacttatg

SEQ ID NO: 18067 - DNA, 20 bp, Gossypium hirsutum
cacaaatttatataattatg

SEQ ID NO: 18068 - DNA, 26 bp, Gossypium hirsutum
gcttctttaacctgaattgagcatgt

SEQ ID NO: 18069 - DNA, 34 bp, Gossypium hirsutum
cggataaattacatcataggtcactcaatattgt

SEQ ID NO: 18070 - DNA, 20 bp, Gossypium hirsutum
aatttgatcactactttttt

SEQ ID NO: 18071 - DNA, 19 bp, Gossypium hirsutum
aatttgatcactatttttt

SEQ ID NO: 18072 - DNA, 25 bp, Gossypium hirsutum
gtgggagaagaggaagaaggagata

SEQ ID NO: 18073 - DNA, 24 bp, Gossypium hirsutum
ccagtctaacatgccctccaatat

SEQ ID NO: 18074 - DNA, 19 bp, Gossypium hirsutum
tgcttaaaggttataatgc

SEQ ID NO: 18075 - DNA, 17 bp, Gossypium hirsutum
cttaaaggtcataatgc

SEQ ID NO: 18076 - DNA, 29 bp, Gossypium hirsutum
gcagtaattgtgaaaatttgggtgatcaa

SEQ ID NO: 18077 - DNA, 24 bp, Gossypium hirsutum
tccaacacaaggtttgaaggctat

SEQ ID NO: 18078 - DNA, 18 bp, Gossypium hirsutum
acagagttccccttggtg

SEQ ID NO: 18079 - DNA, 20 bp, Gossypium hirsutum
ttacagagtttcccttggtg

SEQ ID NO: 18080 - DNA, 38 bp, Gossypium hirsutum
cacagtgatgttaattgtgatttatatattccaaaaga

SEQ ID NO: 18081 - DNA, 25 bp, Gossypium hirsutum
ccactgttgaaactccatctgagat

SEQ ID NO: 18082 - DNA, 17 bp, Gossypium hirsutum
cattcacggaatagatg

SEQ ID NO: 18083 - DNA, 15 bp, Gossypium hirsutum
ttcacggcatagatg

SEQ ID NO: 18084 - DNA, 21 bp, Gossypium hirsutum
agagcagcagaaaccacgaat

SEQ ID NO: 18085 - DNA, 22 bp, Gossypium hirsutum
ggtctctcaagtctgccatctc

SEQ ID NO: 18086 - DNA, 20 bp, Gossypium hirsutum
caacagtatacatagcattc

SEQ ID NO: 18087 - DNA, 18 bp, Gossypium hirsutum
acagtatacaaagcattc

SEQ ID NO: 18088 - DNA, 29 bp, Gossypium hirsutum
ggatggatcgaagtatgcctttaattaca

SEQ ID NO: 18089 - DNA, 27 bp, Gossypium hirsutum
cgaaaagcctatgattaggatgtcaca

SEQ ID NO: 18090 - DNA, 19 bp, Gossypium hirsutum
cgattcgtattatattctc

SEQ ID NO: 18091 - DNA, 17 bp, Gossypium hirsutum
attcgtatgatattctc

SEQ ID NO: 18092 - DNA, 25 bp, Gossypium hirsutum
gcccaaaggctttcctattttcatt

SEQ ID NO: 18093 - DNA, 23 bp, Gossypium hirsutum
ggaacgaaatggcaacttaagct

SEQ ID NO: 18094 - DNA, 22 bp, Gossypium hirsutum
aatatagagaagattggtttca

SEQ ID NO: 18095 - DNA, 21 bp, Gossypium hirsutum
atatagagaagattgatttca

SEQ ID NO: 18096 - DNA, 33 bp, Gossypium hirsutum
ggaacacttaacattcttataggcatatttgag

SEQ ID NO: 18097 - DNA, 26 bp, Gossypium hirsutum
agggctttccaagtcattatcttacg

SEQ ID NO: 18098 - DNA, 18 bp, Gossypium hirsutum
acttactccttgattctg

SEQ ID NO: 18099 - DNA, 18 bp, Gossypium hirsutum
acttactccttcattctg

SEQ ID NO: 18100 - DNA, 28 bp, Gossypium hirsutum
ttctagtcaggtaatctcttgtggtaca

SEQ ID NO: 18101 - DNA, 24 bp, Gossypium hirsutum
aagcacttcctgaggatccatttt

SEQ ID NO: 18102 - DNA, 19 bp, Gossypium hirsutum
accaaattcttctatctcc

SEQ ID NO: 18103 - DNA, 17 bp, Gossypium hirsutum
caaattcttcgatctcc

SEQ ID NO: 18104 - DNA, 27 bp, Gossypium hirsutum
gctgtatttggaagaacactagaacca

SEQ ID NO: 18105 - DNA, 25 bp, Gossypium hirsutum
agcaacccagttctagccatttatt

SEQ ID NO: 18106 - DNA, 20 bp, Gossypium hirsutum
cactcaagagaactattaag

SEQ ID NO: 18107 - DNA, 19 bp, Gossypium hirsutum
actcaagagaactattgag

SEQ ID NO: 18108 - DNA, 28 bp, Gossypium hirsutum
tgtggtcttactctaacattctccttca

SEQ ID NO: 18109 - DNA, 25 bp, Gossypium hirsutum
gttcagtttggaacttgtgaatcgt

SEQ ID NO: 18110 - DNA, 20 bp, Gossypium hirsutum
caaaccactcatctcaccga

SEQ ID NO: 18111 - DNA, 17 bp, Gossypium hirsutum
accactcatcacaccga

SEQ ID NO: 18112 - DNA, 25 bp, Gossypium hirsutum
gcgatccatgattgtacagaaggtt

SEQ ID NO: 18113 - DNA, 25 bp, Gossypium hirsutum
gacatgtgttcttcaaccttcaagt

SEQ ID NO: 18114 - DNA, 23 bp, Gossypium hirsutum
ataagttttctcttaaaaaataa

SEQ ID NO: 18115 - DNA, 21 bp, Gossypium hirsutum
aagttttctcttaaagaataa

SEQ ID NO: 18116 - DNA, 29 bp, Gossypium hirsutum
caaatcgaaacaggtttagcacttattgt

SEQ ID NO: 18117 - DNA, 30 bp, Gossypium hirsutum
aagcgaatagcctgcaaataactttaaatt

SEQ ID NO: 18118 - DNA, 19 bp, Gossypium hirsutum
aaagacaaagacacataat

SEQ ID NO: 18119 - DNA, 15 bp, Gossypium hirsutum
acaacgacacataat

SEQ ID NO: 18120 - DNA, 42 bp, Gossypium hirsutum
ctctttttaaggattattattaggtatattagcaatgcaatt

SEQ ID NO: 18121 - DNA, 29 bp, Gossypium hirsutum
ggttattaaaatcgttgctatatgggctt

SEQ ID NO: 18122 - DNA, 18 bp, Gossypium hirsutum
aattggtacagatggtgc

SEQ ID NO: 18123 - DNA, 18 bp, Gossypium hirsutum
aattggtacagatagtgc

SEQ ID NO: 18124 - DNA, 24 bp, Gossypium hirsutum
caagagaagaggaagaagtgcctt

SEQ ID NO: 18125 - DNA, 31 bp, Gossypium hirsutum
ctcgctcctacattgacaaaaataaatcaaa

SEQ ID NO: 18126 - DNA, 19 bp, Gossypium hirsutum
tgatctgtgacttcttgtt

SEQ ID NO: 18127 - DNA, 17 bp, Gossypium hirsutum
atctgtgacgtcttgtt

SEQ ID NO: 18128 - DNA, 25 bp, Gossypium hirsutum
aagctgagaggaaggtattttgcat

SEQ ID NO: 18129 - DNA, 31 bp, Gossypium hirsutum
acaggtagtccctctattaaaaatgaaacaa

SEQ ID NO: 18130 - DNA, 23 bp, Gossypium hirsutum
attttcattttttttaaaatttt

SEQ ID NO: 18131 - DNA, 21 bp, Gossypium hirsutum
tttcatttttttttaaatttt

SEQ ID NO: 18132 - DNA, 34 bp, Gossypium hirsutum
gttaaagaaactaccgtgtgtttaagtaattgat

SEQ ID NO: 18133 - DNA, 25 bp, Gossypium hirsutum
gctgctgctatttgtagtccagata

SEQ ID NO: 18134 - DNA, 23 bp, Gossypium hirsutum
agatcacagaaatattagttaaa

SEQ ID NO: 18135 - DNA, 21 bp, Gossypium hirsutum
atcacagaaatactagttaaa

SEQ ID NO: 18136 - DNA, 27 bp, Gossypium hirsutum
tttcttttgtttgttcaatcgtctgct

SEQ ID NO: 18137 - DNA, 40 bp, Gossypium hirsutum
gatacgcctacattatgtctaaattatatatttgaaaggt

SEQ ID NO: 18138 - DNA, 18 bp, Gossypium hirsutum
tttggatttcaaaaatta

SEQ ID NO: 18139 - DNA, 18 bp, Gossypium hirsutum
atttggatttcaaaatta

SEQ ID NO: 18140 - DNA, 35 bp, Gossypium hirsutum
ctatctataaataaaaacaattaggcagccaaaca

SEQ ID NO: 18141 - DNA, 17 bp, Gossypium hirsutum
gaaggcaccgccattgc

SEQ ID NO: 18142 - DNA, 15 bp, Gossypium hirsutum
ttcaggccccaaacg

SEQ ID NO: 18143 - DNA, 14 bp, Gossypium hirsutum
tcaggcctcaaacg

SEQ ID NO: 18144 - DNA, 26 bp, Gossypium hirsutum
agttgagttggatttctggttgaaga

SEQ ID NO: 18145 - DNA, 28 bp, Gossypium hirsutum
aagttgtgatttaagtcactaggctgtt

SEQ ID NO: 18146 - DNA, 15 bp, Gossypium hirsutum
tcccaccgcctacac

SEQ ID NO: 18147 - DNA, 15 bp, Gossypium hirsutum
tcccaccgtctacac

SEQ ID NO: 18148 - DNA, 27 bp, Gossypium hirsutum
ggttcacagatttgtgatgttcaaagt

SEQ ID NO: 18149 - DNA, 33 bp, Gossypium hirsutum
tcaaattgtgatcacttagaatctttcttgtga

SEQ ID NO: 18150 - DNA, 16 bp, Gossypium hirsutum
cttggcatttttttgg

SEQ ID NO: 18151 - DNA, 15 bp, Gossypium hirsutum
cttggcattttttgg

SEQ ID NO: 18152 - DNA, 27 bp, Gossypium hirsutum
cactggaccagttcattttaaaacact

SEQ ID NO: 18153 - DNA, 32 bp, Gossypium hirsutum
ctgttcattcattttgtttgtttgtcattact

SEQ ID NO: 18154 - DNA, 19 bp, Gossypium hirsutum
ttttgtacatagcgaaaaa

SEQ ID NO: 18155 - DNA, 21 bp, Gossypium hirsutum
aattttgtacataacgaaaaa

SEQ ID NO: 18156 - DNA, 30 bp, Gossypium hirsutum
tccatacgcgaatgtatcaaataattacct

SEQ ID NO: 18157 - DNA, 33 bp, Gossypium hirsutum; identical to SEQ ID NO: 17013

SEQ ID NO: 18158 - DNA, 22 bp, Gossypium hirsutum
tcattaatataggtgcttcaac

SEQ ID NO: 18159 - DNA, 21 bp, Gossypium hirsutum
cattaatataggtgcttccac

SEQ ID NO: 18160 - DNA, 27 bp, Gossypium hirsutum
gttccgcaactttctatctttgacaat

SEQ ID NO: 18161 - DNA, 38 bp, Gossypium hirsutum
tttcttaataaatccgtacatctatgtttttcataggt

SEQ ID NO: 18162 - DNA, 14 bp, Gossypium hirsutum
actgtgcaactgct

SEQ ID NO: 18163 - DNA, 14 bp, Gossypium hirsutum
actgtggaactgct

SEQ ID NO: 18164 - DNA, 31 bp, Gossypium hirsutum
acttattctaagcctataaggaggttcaagt

SEQ ID NO: 18165 - DNA, 39 bp, Gossypium hirsutum
agtgctgagaattagaggaataacataaatttaattagt

SEQ ID NO: 18166 - DNA, 19 bp, Gossypium hirsutum
ccatcgaagattcctcgac

SEQ ID NO: 18167 - DNA, 18 bp, Gossypium hirsutum
catcgaagattgctcgac

SEQ ID NO: 18168 - DNA, 25 bp, Gossypium hirsutum
acatttggcacaacttgcatctaag

SEQ ID NO: 18169 - DNA, 25 bp, Gossypium hirsutum
ggctttttctctacgagttgtctga

SEQ ID NO: 18170 - DNA, 18 bp, Gossypium hirsutum
caagaactcgagccacaa

SEQ ID NO: 18171 - DNA, 17 bp, Gossypium hirsutum
aagaactcgggccacaa

SEQ ID NO: 18172 - DNA, 25 bp, Gossypium hirsutum
cttgctggttaataccgcattgatt

SEQ ID NO: 18173 - DNA, 25 bp, Gossypium hirsutum
cgttgcattcgacaagagaactttt

SEQ ID NO: 18174 - DNA, 18 bp, Gossypium hirsutum
atctgtctctggatggtg

SEQ ID NO: 18175 - DNA, 16 bp, Gossypium hirsutum
ctgtctctgggtggtg

SEQ ID NO: 18176 - DNA, 25 bp, Gossypium hirsutum
aggatcgtcttcaatgccagaattt

SEQ ID NO: 18177 - DNA, 25 bp, Gossypium hirsutum
agttgttccttccttccaatgtcat

SEQ ID NO: 18178 - DNA, 15 bp, Gossypium hirsutum
accgacaagttaaac

SEQ ID NO: 18179 - DNA, 15 bp, Gossypium hirsutum
accgacaagttgaac

SEQ ID NO: 18180 - DNA, 24 bp, Gossypium hirsutum
tgtaagtgtatctgctgctgcatt

SEQ ID NO: 18181 - DNA, 33 bp, Gossypium hirsutum
ggttttcacattaagttgcagtatgtactaatt

SEQ ID NO: 18182 - DNA, 19 bp, Gossypium hirsutum
ttttcatctacaaggaatg

SEQ ID NO: 18183 - DNA, 19 bp, Gossypium hirsutum
ttttcatctacatggaatg

SEQ ID NO: 18184 - DNA, 22 bp, Gossypium hirsutum
ccctggcattgtttcaccatct

SEQ ID NO: 18185 - DNA, 28 bp, Gossypium hirsutum
tttgaggcatgaacttagacaactactc

SEQ ID NO: 18186 - DNA, 20 bp, Gossypium hirsutum
tgttttttgttcaaattagt

SEQ ID NO: 18187 - DNA, 18 bp, Gossypium hirsutum
ttttttgttcgaattagt

SEQ ID NO: 18188 - DNA, 25 bp, Gossypium hirsutum
gggcctaaactaaggttttcaagga

SEQ ID NO: 18189 - DNA, 19 bp, Gossypium hirsutum
gtgaagatgccccagctga

SEQ ID NO: 18190 - DNA, 16 bp, Gossypium hirsutum
ttcatgtggaaagcaa

SEQ ID NO: 18191 - DNA, 17 bp, Gossypium hirsutum
cttcatgtgaaaagcaa

SEQ ID NO: 18192 - DNA, 21 bp, Gossypium hirsutum
agcatggcaagtaccggaaaa

SEQ ID NO: 18193 - DNA, 17 bp, Gossypium hirsutum
tgctggtgtggcttccg

SEQ ID NO: 18194 - DNA, 17 bp, Gossypium hirsutum
ctttcgtgccccagttg

SEQ ID NO: 18195 - DNA, 17 bp, Gossypium hirsutum
ctttcgtgctccagttg

SEQ ID NO: 18196 - DNA, 22 bp, Gossypium hirsutum
accatgatgctgcctcttcaag

SEQ ID NO: 18197 - DNA, 25 bp, Gossypium hirsutum
ggccaagggatacatgtaacctatt

SEQ ID NO: 18198 - DNA, 16 bp, Gossypium hirsutum
ttttaccggagaaatg

SEQ ID NO: 18199 - DNA, 15 bp, Gossypium hirsutum
tttaccggcgaaatg

SEQ ID NO: 18200 - DNA, 25 bp, Gossypium hirsutum
acatggcattctctcctttgtcaaa

SEQ ID NO: 18201 - DNA, 38 bp, Gossypium hirsutum
tgtgtgattttaaaagttgtatagtttggtctataact

SEQ ID NO: 18202 - DNA, 17 bp, Gossypium hirsutum
atcccctattaaaaaca

SEQ ID NO: 18203 - DNA, 18 bp, Gossypium hirsutum
catcccctatttaaaaca

SEQ ID NO: 18204 - DNA, 25 bp, Gossypium hirsutum
catcatgaatggcctgcaatattgg

SEQ ID NO: 18205 - DNA, 27 bp, Gossypium hirsutum
cacctcattcatccttcttccttttct

SEQ ID NO: 18206 - DNA, 14 bp, Gossypium hirsutum
atgtggcattttct

SEQ ID NO: 18207 - DNA, 13 bp, Gossypium hirsutum
tgtggcgttttct

SEQ ID NO: 18208 - DNA, 25 bp, Gossypium hirsutum
gcccctagatggtaactgagtaaaa

SEQ ID NO: 18209 - DNA, 41 bp, Gossypium hirsutum
ctcaatttaaaaaaaattatcaaatgatgaccgaactattc

SEQ ID NO: 18210 - DNA, 22 bp, Gossypium hirsutum
ttaaaatcgttgttatatgacc

SEQ ID NO: 18211 - DNA, 19 bp, Gossypium hirsutum
aaatcgttgttgtatgacc

SEQ ID NO: 18212 - DNA, 30 bp, Gossypium hirsutum
gagagcttttaattaatgtagtcggtacga

SEQ ID NO: 18213 - DNA, 21 bp, Gossypium hirsutum
ccttcaacaccagacgaagct

SEQ ID NO: 18214 - DNA, 17 bp, Gossypium hirsutum
tcttgattcggctcgtc

SEQ ID NO: 18215 - DNA, 18 bp, Gossypium hirsutum
atcttgattcagctcgtc

SEQ ID NO: 18216 - DNA, 23 bp, Gossypium hirsutum
cccagataacaggacctcttcac

SEQ ID NO: 18217 - DNA, 23 bp, Gossypium hirsutum
gccataggatagctcacttgcat

SEQ ID NO: 18218 - DNA, 17 bp, Gossypium hirsutum
ctggtggaacttcctta

SEQ ID NO: 18219 - DNA, 17 bp, Gossypium hirsutum
ctggtggaacctcctta

SEQ ID NO: 18220 - DNA, 27 bp, Gossypium hirsutum
gctgtaaaagctcttgtgctatttagg

SEQ ID NO: 18221 - DNA, 31 bp, Gossypium hirsutum
atggcatcaataagatctgtgattatgaact

SEQ ID NO: 18222 - DNA, 23 bp, Gossypium hirsutum
ttttttacagaattataaaattt

SEQ ID NO: 18223 - DNA, 25 bp, Gossypium hirsutum
atttttttacagaattataatattt

SEQ ID NO: 18224 - DNA, 30 bp, Gossypium hirsutum
tcgggaggatttataagttttttcctttga

SEQ ID NO: 18225 - DNA, 25 bp, Gossypium hirsutum
gaattcacaacatcgagttgcagtt

SEQ ID NO: 18226 - DNA, 20 bp, Gossypium hirsutum
ttaccactgtatcatttgat

SEQ ID NO: 18227 - DNA, 20 bp, Gossypium hirsutum
ttaccactgtatcctttgat

SEQ ID NO: 18228 - DNA, 24 bp, Gossypium hirsutum
gttcagttcacaatgggagggatt

SEQ ID NO: 18229 - DNA, 25 bp, Gossypium hirsutum
gagacagaggaatgcaaagaagaca

SEQ ID NO: 18230 - DNA, 21 bp, Gossypium hirsutum
aaagatggattcagtggagag

SEQ ID NO: 18231 - DNA, 20 bp, Gossypium hirsutum
aagatggattcaatggagag

SEQ ID NO: 18232 - DNA, 33 bp, Gossypium hirsutum
tcaaaatagttgaaatcaaattgactgcttcat

SEQ ID NO: 18233 - DNA, 39 bp, Gossypium hirsutum
catttcgtaacaaaacaataacataaatgattaaaacgt

SEQ ID NO: 18234 - DNA, 24 bp, Gossypium hirsutum
aatagttagttttgtttattttag

SEQ ID NO: 18235 - DNA, 26 bp, Gossypium hirsutum
aaaatagttagttttatttattttag

SEQ ID NO: 18236 - DNA, 28 bp, Gossypium hirsutum
agcaacatgagttactcttggttaatga

SEQ ID NO: 18237 - DNA, 33 bp, Gossypium hirsutum
actcaccatatgtgtgaaagtcattgatttata

SEQ ID NO: 18238 - DNA, 18 bp, Gossypium hirsutum
tcctttgtttatctttcc

SEQ ID NO: 18239 - DNA, 17 bp, Gossypium hirsutum
cctttgtttctctttcc

SEQ ID NO: 18240 - DNA, 25 bp, Gossypium hirsutum
cgaccagcaagaacatgaaacaatt

SEQ ID NO: 18241 - DNA, 27 bp, Gossypium hirsutum
gtggatttatgagcacatttgatgact

SEQ ID NO: 18242 - DNA, 16 bp, Gossypium hirsutum
aaaggctcagtctttt

SEQ ID NO: 18243 - DNA, 17 bp, Gossypium hirsutum
aaaaggctcagtgtttt

SEQ ID NO: 18244 - DNA, 39 bp, Gossypium hirsutum
caaaagattattatagtaaacatccatgaaaacaactga

SEQ ID NO: 18245 - DNA, 31 bp, Gossypium hirsutum
aaggcataaagttttctgtgaacaaatcaat

SEQ ID NO: 18246 - DNA, 16 bp, Gossypium hirsutum
aacacattcagaaaac

SEQ ID NO: 18247 - DNA, 15 bp, Gossypium hirsutum
acacaatcagaaaac

SEQ ID NO: 18248 - DNA, 32 bp, Gossypium hirsutum
cctgggaaaaaaaatcaaataagaaagctcaa

SEQ ID NO: 18249 - DNA, 27 bp, Gossypium hirsutum
gcagtgggatgtttttcgtatttgtat

SEQ ID NO: 18250 - DNA, 15 bp, Gossypium hirsutum
cagctgttgtcatcc

SEQ ID NO: 18251 - DNA, 14 bp, Gossypium hirsutum
agctgttgccatcc

SEQ ID NO: 18252 - DNA, 25 bp, Gossypium hirsutum
accttctcttccactggagtcatat

SEQ ID NO: 18253 - DNA, 25 bp, Gossypium hirsutum
tgagtaacaagcaacggtaataggg

SEQ ID NO: 18254 - DNA, 16 bp, Gossypium hirsutum
cctgtttcctctcccc

SEQ ID NO: 18255 - DNA, 14 bp, Gossypium hirsutum
tgtttccgctcccc

SEQ ID NO: 18256 - DNA, 29 bp, Gossypium hirsutum
ttgctagccttatgtcaatgacttaatgt

SEQ ID NO: 18257 - DNA, 25 bp, Gossypium hirsutum
tcgttccatgtagagttttctgctc

SEQ ID NO: 18258 - DNA, 18 bp, Gossypium hirsutum
aatgaagaatgccaatcc

SEQ ID NO: 18259 - DNA, 19 bp, Gossypium hirsutum
caatgaagaattccaatcc

SEQ ID NO: 18260 - DNA, 30 bp, Gossypium hirsutum
tggaattgtcactaccacttaaaatggaat

SEQ ID NO: 18261 - DNA, 29 bp, Gossypium hirsutum
caatggacatagaatttactgaaggcaaa

SEQ ID NO: 18262 - DNA, 20 bp, Gossypium hirsutum
acttacctcaactgagttga

SEQ ID NO: 18263 - DNA, 18 bp, Gossypium hirsutum
ttacctcaaccgagttga

SEQ ID NO: 18264 - DNA, 25 bp, Gossypium hirsutum
cggaatcctacacctgctataacaa

SEQ ID NO: 18265 - DNA, 27 bp, Gossypium hirsutum
tgaagagaggtctgatcatgtgtctaa

SEQ ID NO: 18266 - DNA, 15 bp, Gossypium hirsutum
cagctccctggtcct

SEQ ID NO: 18267 - DNA, 14 bp, Gossypium hirsutum
agctcgctggtcct

SEQ ID NO: 18268 - DNA, 21 bp, Gossypium hirsutum
ccatagctggagggtgcttag

SEQ ID NO: 18269 - DNA, 31 bp, Gossypium hirsutum
tcttttttctctttgggatttttcttggttt

SEQ ID NO: 18270 - DNA, 17 bp, Gossypium hirsutum
caacaaaagaaaacaac

SEQ ID NO: 18271 - DNA, 17 bp, Gossypium hirsutum
caacaaaaaaaaacaac

SEQ ID NO: 18272 - DNA, 26 bp, Gossypium hirsutum
catcaaaacttgacattacccagcaa

SEQ ID NO: 18273 - DNA, 30 bp, Gossypium hirsutum
catcactcgtgaaaaatggatttaaaatgg

SEQ ID NO: 18274 - DNA, 17 bp, Gossypium hirsutum
caaaagacacatctcac

SEQ ID NO: 18275 - DNA, 15 bp, Gossypium hirsutum
aaagacgcatctcac

SEQ ID NO: 18276 - DNA, 32 bp, Gossypium hirsutum
aaaacttcaagtcttaagatctacatggttga

SEQ ID NO: 18277 - DNA, 30 bp, Gossypium hirsutum
acttgaatttgttctctaggtaaagcaaga

SEQ ID NO: 18278 - DNA, 20 bp, Gossypium hirsutum
ttcttcttaagacaaaatat

SEQ ID NO: 18279 - DNA, 17 bp, Gossypium hirsutum
ttcttgagacaaaatat

SEQ ID NO: 18280 - DNA, 44 bp, Gossypium hirsutum
aatcatattgcaatttgtttatttactgtactaataaatcagaa

SEQ ID NO: 18281 - DNA, 34 bp, Gossypium hirsutum
ttatcgggaatacttaatgaccataaatcattgt

SEQ ID NO: 18282 - DNA, 19 bp, Gossypium hirsutum
ctattgatgaggtttacac

SEQ ID NO: 18283 - DNA, 19 bp, Gossypium hirsutum
ctattgatgagatttacac

SEQ ID NO: 18284 - DNA, 27 bp, Gossypium hirsutum
catctacagcgtactatttacatgcct

SEQ ID NO: 18285 - DNA, 32 bp, Gossypium hirsutum
cttattcataaacagaatgcctctagtactgt

SEQ ID NO: 18286 - DNA, 18 bp, Gossypium hirsutum
ctccttgtagaccttctt

SEQ ID NO: 18287 - DNA, 16 bp, Gossypium hirsutum
ccttgtagagcttctt

SEQ ID NO: 18288 - DNA, 27 bp, Gossypium hirsutum
tgatgacgactatttgcatatgttcga

SEQ ID NO: 18289 - DNA, 27 bp, Gossypium hirsutum
gacagcagaaaacaaaaagttggatca

SEQ ID NO: 18290 - DNA, 17 bp, Gossypium hirsutum
attcacgtcgtgttcaa

SEQ ID NO: 18291 - DNA, 14 bp, Gossypium hirsutum
cacgtcgggttcaa

SEQ ID NO: 18292 - DNA, 22 bp, Gossypium hirsutum
cagatcagaaggttgcgtgttc

SEQ ID NO: 18293 - DNA, 22 bp, Gossypium hirsutum
gggaactttgaccaagggtgtt

SEQ ID NO: 18294 - DNA, 13 bp, Gossypium hirsutum
tctcgcgaatcct

SEQ ID NO: 18295 - DNA, 14 bp, Gossypium hirsutum
ctctcacgaatcct

SEQ ID NO: 18296 - DNA, 20 bp, Gossypium hirsutum
tgcttgccgatggtaacgaa

SEQ ID NO: 18297 - DNA, 47 bp, Gossypium hirsutum
ccatataataatttaaacgtataaaccaaaaatattgcagagtaatt

SEQ ID NO: 18298 - DNA, 20 bp, Gossypium hirsutum
tctgctttcttttattctag

SEQ ID NO: 18299 - DNA, 19 bp, Gossypium hirsutum
ctgctttctttttttctag

SEQ ID NO: 18300 - DNA, 26 bp, Gossypium hirsutum
ggtagtatgcccaagcattaacaaat

SEQ ID NO: 18301 - DNA, 24 bp, Gossypium hirsutum
gctcagacatgctcaagatactgt

SEQ ID NO: 18302 - DNA, 16 bp, Gossypium hirsutum
tcagcctcactgtcca

SEQ ID NO: 18303 - DNA, 15 bp, Gossypium hirsutum
cagcctcgctgtcca

SEQ ID NO: 18304 - DNA, 29 bp, Gossypium hirsutum
gacggtaaacatcatctagctattctcat

SEQ ID NO: 18305 - DNA, 26 bp, Gossypium hirsutum
ggcttaaaacacagagaaaccaatga

SEQ ID NO: 18306 - DNA, 16 bp, Gossypium hirsutum
caatggtttcaatttt

SEQ ID NO: 18307 - DNA, 16 bp, Gossypium hirsutum
caatgatttcaatttt

SEQ ID NO: 18308 - DNA, 35 bp, Gossypium hirsutum
gccaaatcttaatttactaagttgtaattgtcaga

SEQ ID NO: 18309 - DNA, 42 bp, Gossypium hirsutum
caaaattatattctatacatatttcaacacgtacttctttga

SEQ ID NO: 18310 - DNA, 21 bp, Gossypium hirsutum
aaacaccaaatatattttttt

SEQ ID NO: 18311 - DNA, 20 bp, Gossypium hirsutum
aacaccaaatatatattttt

SEQ ID NO: 18312 - DNA, 31 bp, Gossypium hirsutum
gacgggagaatcttgattgaattagtagaaa

SEQ ID NO: 18313 - DNA, 31 bp, Gossypium hirsutum
cccttgtagtttgaatttctttagaatgcaa

SEQ ID NO: 18314 - DNA, 14 bp, Gossypium hirsutum
acacggtatttctc

SEQ ID NO: 18315 - DNA, 15 bp, Gossypium hirsutum
cacacagtatttctc

SEQ ID NO: 18316 - DNA, 24 bp, Gossypium hirsutum
tccaaaaccaatgctgtaccagaa

SEQ ID NO: 18317 - DNA, 26 bp, Gossypium hirsutum
ggacaattttcattttcacccgtctt

SEQ ID NO: 18318 - DNA, 16 bp, Gossypium hirsutum
ctgaaaccgtaaaatg

SEQ ID NO: 18319 - DNA, 17 bp, Gossypium hirsutum
actgaaacagtaaaatg

SEQ ID NO: 18320 - DNA, 25 bp, Gossypium hirsutum
ggtttacctccaaccaggataagat

SEQ ID NO: 18321 - DNA, 25 bp, Gossypium hirsutum
agtaacagttgtttcccaccattca

SEQ ID NO: 18322 - DNA, 21 bp, Gossypium hirsutum
caggaatttccatatatgatt

SEQ ID NO: 18323 - DNA, 21 bp, Gossypium hirsutum
caggaatttccatatctgatt

SEQ ID NO: 18324 - DNA, 21 bp, Gossypium hirsutum
gatcctcaaagggtcctggaa

SEQ ID NO: 18325 - DNA, 25 bp, Gossypium hirsutum
gatgagcttggcaaaggtttagttg

SEQ ID NO: 18326 - DNA, 15 bp, Gossypium hirsutum
cagcctccgaagtgt

SEQ ID NO: 18327 - DNA, 14 bp, Gossypium hirsutum
agcctccaaagtgt

SEQ ID NO: 18328 - DNA, 32 bp, Gossypium hirsutum
ccaatattatcattaccagaaactgagaagca

SEQ ID NO: 18329 - DNA, 26 bp, Gossypium hirsutum
gtcaccgacctttgactttatatgga

SEQ ID NO: 18330 - DNA, 20 bp, Gossypium hirsutum
caggtcctaaatgcctacca

SEQ ID NO: 18331 - DNA, 19 bp, Gossypium hirsutum
caggtcctaaatgctacca

SEQ ID NO: 18332 - DNA, 25 bp, Gossypium hirsutum
gctcatgaccacaccgaaatttaat

SEQ ID NO: 18333 - DNA, 26 bp, Gossypium hirsutum
agcgccttacctaaatatcctgtttg

SEQ ID NO: 18334 - DNA, 13 bp, Gossypium hirsutum
cctggcactatcc

SEQ ID NO: 18335 - DNA, 14 bp, Gossypium hirsutum
ccctgacactatcc

SEQ ID NO: 18336 - DNA, 21 bp, Gossypium hirsutum
ccacggagtgttactctctcc

SEQ ID NO: 18337 - DNA, 25 bp, Gossypium hirsutum
cacgaaaggaggcaatgttaaaagt

SEQ ID NO: 18338 - DNA, 17 bp, Gossypium hirsutum
atgcaggagcctccata

SEQ ID NO: 18339 - DNA, 17 bp, Gossypium hirsutum
atgcaggagactccata

SEQ ID NO: 18340 - DNA, 31 bp, Gossypium hirsutum
acagaaagggtctatttgcactaatttactt

SEQ ID NO: 18341 - DNA, 29 bp, Gossypium hirsutum
ccttgttttatcctcattcttgtgcctaa

SEQ ID NO: 18342 - DNA, 19 bp, Gossypium hirsutum
ataaaataagggcaataaa

SEQ ID NO: 18343 - DNA, 19 bp, Gossypium hirsutum
ataaaataaggccaataaa

SEQ ID NO: 18344 - DNA, 32 bp, Gossypium hirsutum
ttcctccactttcgttacaagtataaagaaaa

SEQ ID NO: 18345 - DNA, 28 bp, Gossypium hirsutum
agcaactaaggacaattaatcacgacat

SEQ ID NO: 18346 - DNA, 20 bp, Gossypium hirsutum
atgcaggctaaacttgttaa

SEQ ID NO: 18347 - DNA, 17 bp, Gossypium hirsutum
caggctaagcttgttaa

SEQ ID NO: 18348 - DNA, 43 bp, Gossypium hirsutum
gtataataacaaatttagtacttaaagtttacacattctgaca

SEQ ID NO: 18349 - DNA, 31 bp, Gossypium hirsutum
tgtttgattcttttcgagttttattgtggtt

SEQ ID NO: 18350 - DNA, 18 bp, Gossypium hirsutum
cagttggtcaaatatata

SEQ ID NO: 18351 - DNA, 18 bp, Gossypium hirsutum
cagttggtcaagtatata

SEQ ID NO: 18352 - DNA, 30 bp, Gossypium hirsutum
cccctaaatttcactagtacaaatgcaatc

SEQ ID NO: 18353 - DNA, 28 bp, Gossypium hirsutum
tgggtatcagtttgaaaggaatcgaatt

SEQ ID NO: 18354 - DNA, 22 bp, Gossypium hirsutum
ttcaaagtgttatgatagaagt

SEQ ID NO: 18355 - DNA, 20 bp, Gossypium hirsutum
caaagtgttatggtagaagt

SEQ ID NO: 18356 - DNA, 23 bp, Gossypium hirsutum
cagggaaccatgtatgggaaagt

SEQ ID NO: 18357 - DNA, 25 bp, Gossypium hirsutum
gcctaagtggctttaaaggtggttt

SEQ ID NO: 18358 - DNA, 18 bp, Gossypium hirsutum
aaaagctgttaatgaaag

SEQ ID NO: 18359 - DNA, 16 bp, Gossypium hirsutum
aagctgttgatgaaag

SEQ ID NO: 18360 - DNA, 24 bp, Gossypium hirsutum
gccactccaagtttgttagttagc

SEQ ID NO: 18361 - DNA, 23 bp, Gossypium hirsutum
gccgattagaggattgcaacttc

SEQ ID NO: 18362 - DNA, 19 bp, Gossypium hirsutum
ctcatgatgttctaatgat

SEQ ID NO: 18363 - DNA, 17 bp, Gossypium hirsutum
catgatgttgtaatgat

SEQ ID NO: 18364 - DNA, 26 bp, Gossypium hirsutum
aacagaatcgggctttctatctaacg

SEQ ID NO: 18365 - DNA, 29 bp, Gossypium hirsutum
gcacttgaattgaagaaagatagggtgaa

SEQ ID NO: 18366 - DNA, 17 bp, Gossypium hirsutum
ctataaggcaaactgag

SEQ ID NO: 18367 - DNA, 17 bp, Gossypium hirsutum
ctataaggcgaactgag

SEQ ID NO: 18368 - DNA, 25 bp, Gossypium hirsutum
ccaactcattttcagcccttgttaa

SEQ ID NO: 18369 - DNA, 24 bp, Gossypium hirsutum
gcaattcttttgcaatgcaaggtt

SEQ ID NO: 18370 - DNA, 18 bp, Gossypium hirsutum
caatctgtccactgtgtg

SEQ ID NO: 18371 - DNA, 18 bp, Gossypium hirsutum
caatctgtccactatgtg

SEQ ID NO: 18372 - DNA, 29 bp, Gossypium hirsutum
tgctgtagatagttatccttctcttttgc

SEQ ID NO: 18373 - DNA, 22 bp, Gossypium hirsutum
agagcggcctaaaaggatcaac

SEQ ID NO: 18374 - DNA, 23 bp, Gossypium hirsutum
aagtgtacaattttttttatttc

SEQ ID NO: 18375 - DNA, 21 bp, Gossypium hirsutum
agtgtacaatttttttatttc

SEQ ID NO: 18376 - DNA, 28 bp, Gossypium hirsutum
ctctgctactgcctttgttttaaattga

SEQ ID NO: 18377 - DNA, 25 bp, Gossypium hirsutum
cgaagaaagagggtcgaattgactt

SEQ ID NO: 18378 - DNA, 19 bp, Gossypium hirsutum
ttgaaaaaaaagggaaaat

SEQ ID NO: 18379 - DNA, 18 bp, Gossypium hirsutum
ttgaaaaaaagggaaaat

SEQ ID NO: 18380 - DNA, 26 bp, Gossypium hirsutum
ggtccataccgcttagatctatcaca

SEQ ID NO: 18381 - DNA, 21 bp, Gossypium hirsutum
acgacaggtggtgatgcattt

SEQ ID NO: 18382 - DNA, 16 bp, Gossypium hirsutum
tcctttacataaatcc

SEQ ID NO: 18383 - DNA, 14 bp, Gossypium hirsutum
ctttacaaaaatcc

SEQ ID NO: 18384 - DNA, 35 bp, Gossypium hirsutum
gtttgtttgatacttatgatttttgtgtgagtttt

SEQ ID NO: 18385 - DNA, 25 bp, Gossypium hirsutum
cttgttccgttaggaaggtgatact

SEQ ID NO: 18386 - DNA, 21 bp, Gossypium hirsutum
aaattagcaaaaaaaatttta

SEQ ID NO: 18387 - DNA, 19 bp, Gossypium hirsutum
aattagcaaaaaaaattta

SEQ ID NO: 18388 - DNA, 25 bp, Gossypium hirsutum
ttccgtcgaacgaattcagattagt

SEQ ID NO: 18389 - DNA, 25 bp, Gossypium hirsutum
cacaaaaacaaacgactagcaacag

SEQ ID NO: 18390 - DNA, 18 bp, Gossypium hirsutum
caaaagcagtagtaaagg

SEQ ID NO: 18391 - DNA, 16 bp, Gossypium hirsutum
aaagcagtggtaaagg

SEQ ID NO: 18392 - DNA, 27 bp, Gossypium hirsutum
gatgtcaaaatcactttcccctttcaa

SEQ ID NO: 18393 - DNA, 26 bp, Gossypium hirsutum
gtggtaatttttcaagttcgggtctt

SEQ ID NO: 18394 - DNA, 21 bp, Gossypium hirsutum
atcagtgacataaactcaaaa

SEQ ID NO: 18395 - DNA, 20 bp, Gossypium hirsutum
tcagtgacataaattcaaaa

SEQ ID NO: 18396 - DNA, 24 bp, Gossypium hirsutum
ggtggtactccattcacaaaggaa

SEQ ID NO: 18397 - DNA, 24 bp, Gossypium hirsutum
gcctgtgggctacaaaaatatggt

SEQ ID NO: 18398 - DNA, 17 bp, Gossypium hirsutum
cacattttgacatcatc

SEQ ID NO: 18399 - DNA, 17 bp, Gossypium hirsutum
cacattttgtcatcatc

SEQ ID NO: 18400 - DNA, 29 bp, Gossypium hirsutum
tcgagcttactcgaataacttgattcaat

SEQ ID NO: 18401 - DNA, 24 bp, Gossypium hirsutum
atctgctcagacggcttcttattc

SEQ ID NO: 18402 - DNA, 16 bp, Gossypium hirsutum
attggaggataatcct

SEQ ID NO: 18403 - DNA, 16 bp, Gossypium hirsutum
attggaggatgatcct

SEQ ID NO: 18404 - DNA, 23 bp, Gossypium hirsutum
ctgacctcacttgctctcttagc

SEQ ID NO: 18405 - DNA, 27 bp, Gossypium hirsutum
ccagtgaagaatgttggaaaatggttt

SEQ ID NO: 18406 - DNA, 18 bp, Gossypium hirsutum
cttctctagagaaaatag

SEQ ID NO: 18407 - DNA, 17 bp, Gossypium hirsutum
cttctctagagaaatag

SEQ ID NO: 18408 - DNA, 25 bp, Gossypium hirsutum
ggtatgattgttaccgctctcttgt

SEQ ID NO: 18409 - DNA, 25 bp, Gossypium hirsutum
ttgcaattcgcaggttatgaagaac

SEQ ID NO: 18410 - DNA, 20 bp, Gossypium hirsutum
ctatattgcaaccgtgacac

SEQ ID NO: 18411 - DNA, 20 bp, Gossypium hirsutum
ctatattgcaactgtgacac

SEQ ID NO: 18412 - DNA, 25 bp, Gossypium hirsutum
caacctatcggacaagagattgctt

SEQ ID NO: 18413 - DNA, 22 bp, Gossypium hirsutum
catggaatttcctcccctggtt

SEQ ID NO: 18414 - DNA, 18 bp, Gossypium hirsutum
tcagacccatattaagca

SEQ ID NO: 18415 - DNA, 17 bp, Gossypium hirsutum
tcagacccatataagca

SEQ ID NO: 18416 - DNA, 29 bp, Gossypium hirsutum
cttgagcgtaaaattgattaaaggctaca

SEQ ID NO: 18417 - DNA, 25 bp, Gossypium hirsutum
catggtcctctccaatctaagtgtt

SEQ ID NO: 18418 - DNA, 19 bp, Gossypium hirsutum
actatctcccaaccttgtt

SEQ ID NO: 18419 - DNA, 18 bp, Gossypium hirsutum
ctatctcccaaacttgtt

SEQ ID NO: 18420 - DNA, 33 bp, Gossypium hirsutum
tcctaataatttgaatgagagtctttgcttctt

SEQ ID NO: 18421 - DNA, 44 bp, Gossypium hirsutum
catttgagagattatttgtttaatgattagtttaagaacaaaac

SEQ ID NO: 18422 - DNA, 18 bp, Gossypium hirsutum
ttccagattgtataattg

SEQ ID NO: 18423 - DNA, 17 bp, Gossypium hirsutum
tccagattgtgtaattg

SEQ ID NO: 18424 - DNA, 30 bp, Gossypium hirsutum
gcctaagaaatgaactcacaaacattaaca

SEQ ID NO: 18425 - DNA, 20 bp, Gossypium hirsutum
gcctgcctacttgcatcact

SEQ ID NO: 18426 - DNA, 20 bp, Gossypium hirsutum
aagttccaacaaattatgga

SEQ ID NO: 18427 - DNA, 20 bp, Gossypium hirsutum
aagttccaacaagttatgga

SEQ ID NO: 18428 - DNA, 41 bp, Gossypium hirsutum
cactggtgctttgatgttaagttcataatttttatataata

SEQ ID NO: 18429 - DNA, 25 bp, Gossypium hirsutum
caggttagatgatgacgccaatgta

SEQ ID NO: 18430 - DNA, 18 bp, Gossypium hirsutum
aagaaacacgtataaaat

SEQ ID NO: 18431 - DNA, 20 bp, Gossypium hirsutum
aaaagaaacacatataaaat

SEQ ID NO: 18432 - DNA, 23 bp, Gossypium hirsutum
cgtcaacgggcacatttgtatat

SEQ ID NO: 18433 - DNA, 19 bp, Gossypium hirsutum
gcccggagtcggtaaaact

SEQ ID NO: 18434 - DNA, 18 bp, Gossypium hirsutum
ccggaatatgtccggaac

SEQ ID NO: 18435 - DNA, 17 bp, Gossypium hirsutum
cggaatatggccggaac

SEQ ID NO: 18436 - DNA, 23 bp, Gossypium hirsutum
gcgacggtgttataatcggagtt

SEQ ID NO: 18437 - DNA, 25 bp, Gossypium hirsutum
gctctcttacggtttcttcaatggt

SEQ ID NO: 18438 - DNA, 13 bp, Gossypium hirsutum
cccgggactttgt

SEQ ID NO: 18439 - DNA, 14 bp, Gossypium hirsutum
tcccggtactttgt

SEQ ID NO: 18440 - DNA, 29 bp, Gossypium hirsutum
gaaaaccaataagggcctttttaacatct

SEQ ID NO: 18441 - DNA, 28 bp, Gossypium hirsutum
ccatctatattaagccatcttccgacat

SEQ ID NO: 18442 - DNA, 18 bp, Gossypium hirsutum
ctctttcaggcctttaaa

SEQ ID NO: 18443 - DNA, 16 bp, Gossypium hirsutum
ctttcaggcgtttaaa

SEQ ID NO: 18444 - DNA, 24 bp, Gossypium hirsutum
cctgatacgaccacttacaatgca

SEQ ID NO: 18445 - DNA, 25 bp, Gossypium hirsutum
acaggtatggttgatgttggtcaaa

SEQ ID NO: 18446 - DNA, 17 bp, Gossypium hirsutum
ctggagctactgaccac

SEQ ID NO: 18447 - DNA, 16 bp, Gossypium hirsutum
tggagctactggccac

SEQ ID NO: 18448 - DNA, 30 bp, Gossypium hirsutum
gcaatacacatgcaataggagattctaaga

SEQ ID NO: 18449 - DNA, 26 bp, Gossypium hirsutum
tcaaatctaacttggcttccacagaa

SEQ ID NO: 18450 - DNA, 14 bp, Gossypium hirsutum
catcgacaaaatca

SEQ ID NO: 18451 - DNA, 14 bp, Gossypium hirsutum
catcgaccaaatca

SEQ ID NO: 18452 - DNA, 25 bp, Gossypium hirsutum
gccgaattcaatcctctcaagatca

SEQ ID NO: 18453 - DNA, 19 bp, Gossypium hirsutum
gctcagcagcctgttctct

SEQ ID NO: 18454 - DNA, 18 bp, Gossypium hirsutum
caaatgttgtcaagatgt

SEQ ID NO: 18455 - DNA, 18 bp, Gossypium hirsutum
caaatgttgtcgagatgt

SEQ ID NO: 18456 - DNA, 28 bp, Gossypium hirsutum
agctttaccttcatactctatgggtgaa

SEQ ID NO: 18457 - DNA, 34 bp, Gossypium hirsutum
gaaaagttttaaaaatggtcatgtaactatccga

SEQ ID NO: 18458 - DNA, 17 bp, Gossypium hirsutum
atgactagcgactaaaa

SEQ ID NO: 18459 - DNA, 20 bp, Gossypium hirsutum
ttaatgactagcaactaaaa

SEQ ID NO: 18460 - DNA, 28 bp, Gossypium hirsutum
gccaattttaacccatgtcatttttcca

SEQ ID NO: 18461 - DNA, 19 bp, Gossypium hirsutum
tgcttggcacccgtatcag

SEQ ID NO: 18462 - DNA, 19 bp, Gossypium hirsutum
aagattaacagccatactc

SEQ ID NO: 18463 - DNA, 16 bp, Gossypium hirsutum
attaacggccatactc

SEQ ID NO: 18464 - DNA, 22 bp, Gossypium hirsutum
tcctcctttgatgatgcttgca

SEQ ID NO: 18465 - DNA, 33 bp, Gossypium hirsutum
tcccacaattataaatttggtagaaaagatcga

SEQ ID NO: 18466 - DNA, 22 bp, Gossypium hirsutum
ttcatttttcaactgtatcaag

SEQ ID NO: 18467 - DNA, 22 bp, Gossypium hirsutum
ttcatttttcaactctatcaag

SEQ ID NO: 18468 - DNA, 40 bp, Gossypium hirsutum
agagaataagagagatgattactttaagattatgcatttt

SEQ ID NO: 18469 - DNA, 28 bp, Gossypium hirsutum
ccattggatgcatatatgatggactttg

SEQ ID NO: 18470 - DNA, 16 bp, Gossypium hirsutum
acattcctccatcttc

SEQ ID NO: 18471 - DNA, 15 bp, Gossypium hirsutum
cattccaccatcttc

SEQ ID NO: 18472 - DNA, 26 bp, Gossypium hirsutum
ggtaatccataccacctttgttgtca

SEQ ID NO: 18473 - DNA, 25 bp, Gossypium hirsutum
ggtgagcgagtttgaaattaatgca

SEQ ID NO: 18474 - DNA, 15 bp, Gossypium hirsutum
ttctcatggaactgc

SEQ ID NO: 18475 - DNA, 15 bp, Gossypium hirsutum
ttctcatgaaactgc

SEQ ID NO: 18476 - DNA, 23 bp, Gossypium hirsutum
gcatgtggttgcttcttggaaaa

SEQ ID NO: 18477 - DNA, 16 bp, Gossypium hirsutum
gcggagcccccaaaac

SEQ ID NO: 18478 - DNA, 16 bp, Gossypium hirsutum
ccttatccccggaagc

SEQ ID NO: 18479 - DNA, 16 bp, Gossypium hirsutum
ccttatcctcggaagc

SEQ ID NO: 18480 - DNA, 21 bp, Gossypium hirsutum
ccggtaagttcatcggcgaat

SEQ ID NO: 18481 - DNA, 24 bp, Gossypium hirsutum
gctggtttgtagaacaactttgca

SEQ ID NO: 18482 - DNA, 18 bp, Gossypium hirsutum
catagcttgatacaaatt

SEQ ID NO: 18483 - DNA, 20 bp, Gossypium hirsutum
tacatagcttgattcaaatt

SEQ ID NO: 18484 - DNA, 28 bp, Gossypium hirsutum
cccatatgtttctttagcttcagttgga

SEQ ID NO: 18485 - DNA, 24 bp, Gossypium hirsutum
aggcttgttgaatgttaccccaaa

SEQ ID NO: 18486 - DNA, 16 bp, Gossypium hirsutum
cccttgtaaaaaaaaa

SEQ ID NO: 18487 - DNA, 16 bp, Gossypium hirsutum
cccttgtaaaaaataa

SEQ ID NO: 18488 - DNA, 26 bp, Gossypium hirsutum
tcaattgagtgcacttttccttagga

SEQ ID NO: 18489 - DNA, 28 bp, Gossypium hirsutum
cctcaaatactttgtgtgcattcctcta

SEQ ID NO: 18490 - DNA, 17 bp, Gossypium hirsutum
caaaagtgagcatttac

SEQ ID NO: 18491 - DNA, 17 bp, Gossypium hirsutum
caaaagtgaccatttac

SEQ ID NO: 18492 - DNA, 31 bp, Gossypium hirsutum
aattaaattatcatcactctagtgtcacggg

SEQ ID NO: 18493 - DNA, 21 bp, Gossypium hirsutum
ggatgccaaaagccaccattt

SEQ ID NO: 18494 - DNA, 19 bp, Gossypium hirsutum
tttgaatgtcagaacctga

SEQ ID NO: 18495 - DNA, 18 bp, Gossypium hirsutum
ttgaatgtcagcacctga

SEQ ID NO: 18496 - DNA, 24 bp, Gossypium hirsutum
cagacaatgcaggatccacagaat

SEQ ID NO: 18497 - DNA, 25 bp, Gossypium hirsutum
gccaaaggtcactaaacaattacgt

SEQ ID NO: 18498 - DNA, 21 bp, Gossypium hirsutum
ttttgaatagttcgatgatca

SEQ ID NO: 18499 - DNA, 19 bp, Gossypium hirsutum
ttgaatagttcgataatca

SEQ ID NO: 18500 - DNA, 33 bp, Gossypium hirsutum
ggttactgttcaactatattggttatcgaatct

SEQ ID NO: 18501 - DNA, 28 bp, Gossypium hirsutum
tggtaacaaaatgacaacgtaagtgact

SEQ ID NO: 18502 - DNA, 17 bp, Gossypium hirsutum
ataacccgagacaaaca

SEQ ID NO: 18503 - DNA, 13 bp, Gossypium hirsutum
cccgaggcaaaca

SEQ ID NO: 18504 - DNA, 44 bp, Gossypium hirsutum
caaataaagaaggaaaaaaaagaagtaaatttgtagtaaaagtt

SEQ ID NO: 18505 - DNA, 19 bp, Gossypium hirsutum
gcgagtgggtcgatgcttt

SEQ ID NO: 18506 - DNA, 20 bp, Gossypium hirsutum
acctggaatatattaaaggt

SEQ ID NO: 18507 - DNA, 20 bp, Gossypium hirsutum
acctggaatatattgaaggt

SEQ ID NO: 18508 - DNA, 25 bp, Gossypium hirsutum
gcatgtccatgtctggatgagtaaa

SEQ ID NO: 18509 - DNA, 30 bp, Gossypium hirsutum
agtctgttgtcgtagacatcaaaataagtt

SEQ ID NO: 18510 - DNA, 22 bp, Gossypium hirsutum
cattaattttgttgccccaaag

SEQ ID NO: 18511 - DNA, 21 bp, Gossypium hirsutum
attaattttgttggcccaaag

SEQ ID NO: 18512 - DNA, 25 bp, Gossypium hirsutum
cccttctgctttgggtcagttatta

SEQ ID NO: 18513 - DNA, 25 bp, Gossypium hirsutum
gtccaattcgagcaagatgtcaaat

SEQ ID NO: 18514 - DNA, 20 bp, Gossypium hirsutum
tcaagttatgtttgataatt

SEQ ID NO: 18515 - DNA, 19 bp, Gossypium hirsutum
caagttatgtctgataatt

SEQ ID NO: 18516 - DNA, 32 bp, Gossypium hirsutum
gtagtaaatatatgtggctttgactcttcact

SEQ ID NO: 18517 - DNA, 23 bp, Gossypium hirsutum
cctaaagcattgcggtcattcaa

SEQ ID NO: 18518 - DNA, 17 bp, Gossypium hirsutum
tcggatcattgccctct

SEQ ID NO: 18519 - DNA, 17 bp, Gossypium hirsutum
tcggatcattgtcctct

SEQ ID NO: 18520 - DNA, 25 bp, Gossypium hirsutum
gccattccgctacaggtattaagta

SEQ ID NO: 18521 - DNA, 21 bp, Gossypium hirsutum
agagcacgttgagcattgact

SEQ ID NO: 18522 - DNA, 21 bp, Gossypium hirsutum
cagaaaccatttatgctttaa

SEQ ID NO: 18523 - DNA, 21 bp, Gossypium hirsutum
cagaaaccatttatactttaa

SEQ ID NO: 18524 - DNA, 26 bp, Gossypium hirsutum
agcagtgaaattcgaaagtgttctct

SEQ ID NO: 18525 - DNA, 43 bp, Gossypium hirsutum
ctaatttaagtacaaaaataatatttgttgaagctatcaatgc

SEQ ID NO: 18526 - DNA, 16 bp, Gossypium hirsutum
cagcatctcggcagaa

SEQ ID NO: 18527 - DNA, 16 bp, Gossypium hirsutum
cagcatctcagcagaa

SEQ ID NO: 18528 - DNA, 28 bp, Gossypium hirsutum
gcgatcaaaactaaaatgatccgattca

SEQ ID NO: 18529 - DNA, 43 bp, Gossypium hirsutum
accgataatttttaaattaacaatttaatggtaaagtttaacg

SEQ ID NO: 18530 - DNA, 23 bp, Gossypium hirsutum
aaaatagttcaattgagtgatac

SEQ ID NO: 18531 - DNA, 21 bp, Gossypium hirsutum
aatagttcaattgagtaatac

SEQ ID NO: 18532 - DNA, 43 bp, Gossypium hirsutum
tgactcatcttaattattaagaaaaagtttaattcttacctca

SEQ ID NO: 18533 - DNA, 39 bp, Gossypium hirsutum
aaaatgtaaagaacatgattaaaacttgcaaagaaaatt

SEQ ID NO: 18534 - DNA, 19 bp, Gossypium hirsutum
attggcattgttgactata

SEQ ID NO: 18535 - DNA, 18 bp, Gossypium hirsutum
ttggcattgttaactata

SEQ ID NO: 18536 - DNA, 30 bp, Gossypium hirsutum
gtacatgatctctaaagtcaatgaccttga

SEQ ID NO: 18537 - DNA, 21 bp, Gossypium hirsutum
gtcccaacctccggatatcag

SEQ ID NO: 18538 - DNA, 18 bp, Gossypium hirsutum
atccaagatacagttttg

SEQ ID NO: 18539 - DNA, 16 bp, Gossypium hirsutum
ccaagatacggttttg

SEQ ID NO: 18540 - DNA, 23 bp, Gossypium hirsutum
ccatgggataggagatcgaaacc

SEQ ID NO: 18541 - DNA, 29 bp, Gossypium hirsutum
attgtgacttaattctggagagaaatgct

SEQ ID NO: 18542 - DNA, 19 bp, Gossypium hirsutum
aaacacattcaggtatgac

SEQ ID NO: 18543 - DNA, 18 bp, Gossypium hirsutum
aacacattcagatatgac

SEQ ID NO: 18544 - DNA, 27 bp, Gossypium hirsutum
ccaaaaattatgtgttccagagagcaa

SEQ ID NO: 18545 - DNA, 29 bp, Gossypium hirsutum
acatcatttgcttctctagtttctgttca

SEQ ID NO: 18546 - DNA, 22 bp, Gossypium hirsutum
tcatttatgttttgatgccatg

SEQ ID NO: 18547 - DNA, 20 bp, Gossypium hirsutum
atttatgtttcgatgccatg

SEQ ID NO: 18548 - DNA, 25 bp, Gossypium hirsutum
gctgcaaacagacagacaaatcaat

SEQ ID NO: 18549 - DNA, 33 bp, Gossypium hirsutum
gctgacatttttttctatttcttatcggtttgt

SEQ ID NO: 18550 - DNA, 20 bp, Gossypium hirsutum
catgaaaattgaaaatttaa

SEQ ID NO: 18551 - DNA, 20 bp, Gossypium hirsutum
catgaaaattgaaattttaa

SEQ ID NO: 18552 - DNA, 43 bp, Gossypium hirsutum
attacttaataagaatggagaaaaaattgatagatagaggaaa

SEQ ID NO: 18553 - DNA, 29 bp, Gossypium hirsutum
gctaagatcatttagtatttccccatgct

SEQ ID NO: 18554 - DNA, 20 bp, Gossypium hirsutum
ctttcaagacattttcaatg

SEQ ID NO: 18555 - DNA, 18 bp, Gossypium hirsutum
ttcaagacatgttcaatg

SEQ ID NO: 18556 - DNA, 25 bp, Gossypium hirsutum
gccactgtcccatctgaaaataaca

SEQ ID NO: 18557 - DNA, 33 bp, Gossypium hirsutum
caataacaaaaatctatttatctaccccgtgtg

SEQ ID NO: 18558 - DNA, 15 bp, Gossypium hirsutum
atagcacaagaaatc

SEQ ID NO: 18559 - DNA, 15 bp, Gossypium hirsutum
atagcacaacaaatc

SEQ ID NO: 18560 - DNA, 25 bp, Gossypium hirsutum
ggtggaaagtttcaatgcatacgaa

SEQ ID NO: 18561 - DNA, 35 bp, Gossypium hirsutum
tgttactctgagcttctattagaaattttccattt

SEQ ID NO: 18562 - DNA, 19 bp, Gossypium hirsutum
ctcagtttttagaaacatc

SEQ ID NO: 18563 - DNA, 18 bp, Gossypium hirsutum
tcagtttttacaaacatc

SEQ ID NO: 18564 - DNA, 31 bp, Gossypium hirsutum
gcctacaaaagggacttgatttttaagtaat

SEQ ID NO: 18565 - DNA, 29 bp, Gossypium hirsutum
agcgaactgcaagaaatttgtatatagga

SEQ ID NO: 18566 - DNA, 16 bp, Gossypium hirsutum
tccctcccttctcttt

SEQ ID NO: 18567 - DNA, 15 bp, Gossypium hirsutum
ccctccctcctcttt

SEQ ID NO: 18568 - DNA, 23 bp, Gossypium hirsutum
ccctcgcatctcagtttcttcac

SEQ ID NO: 18569 - DNA, 25 bp, Gossypium hirsutum
ggacaatcaatcatgcgttggttaa

SEQ ID NO: 18570 - DNA, 17 bp, Gossypium hirsutum
ccatgactgataataag

SEQ ID NO: 18571 - DNA, 16 bp, Gossypium hirsutum
ccatgactgatataag

SEQ ID NO: 18572 - DNA, 26 bp, Gossypium hirsutum
gcataaaaaagaaagggcaagaggaa

SEQ ID NO: 18573 - DNA, 31 bp, Gossypium hirsutum
acacctaaaggcattttcttataatcaacct

SEQ ID NO: 18574 - DNA, 15 bp, Gossypium hirsutum
atgctgcaccatatg

SEQ ID NO: 18575 - DNA, 15 bp, Gossypium hirsutum
atgctgccccatatg

SEQ ID NO: 18576 - DNA, 20 bp, Gossypium hirsutum
acacggttcagatggcacat

SEQ ID NO: 18577 - DNA, 25 bp, Gossypium hirsutum
gtcacaggctgttacaatgaaaagg

SEQ ID NO: 18578 - DNA, 15 bp, Gossypium hirsutum
ccaaggcccccattt

SEQ ID NO: 18579 - DNA, 15 bp, Gossypium hirsutum
ccaaggctcccattt

SEQ ID NO: 18580 - DNA, 24 bp, Gossypium hirsutum
caagggaaaagagtcaccgatacc

SEQ ID NO: 18581 - DNA, 26 bp, Gossypium hirsutum
aattccgtgtcttggaagattgaaga

SEQ ID NO: 18582 - DNA, 17 bp, Gossypium hirsutum
caagcttccatagaaaa

SEQ ID NO: 18583 - DNA, 16 bp, Gossypium hirsutum
aagcttccaaagaaaa

SEQ ID NO: 18584 - DNA, 30 bp, Gossypium hirsutum
catcaaataagacaaattgcccaaagattg

SEQ ID NO: 18585 - DNA, 22 bp, Gossypium hirsutum
gacctggcttgatgatgtggta

SEQ ID NO: 18586 - DNA, 23 bp, Gossypium hirsutum
aaaatacaaattgttcttttttt

SEQ ID NO: 18587 - DNA, 17 bp, Gossypium hirsutum
caaattgttcatttttt

SEQ ID NO: 18588 - DNA, 25 bp, Gossypium hirsutum
tgggaggcaagaagaaagaaagttc

SEQ ID NO: 18589 - DNA, 27 bp, Gossypium hirsutum
gcagacccaagttttaatgaggattca

SEQ ID NO: 18590 - DNA, 20 bp, Gossypium hirsutum
catacgattcaaagattata

SEQ ID NO: 18591 - DNA, 20 bp, Gossypium hirsutum
catacgattcaaatattata

SEQ ID NO: 18592 - DNA, 41 bp, Gossypium hirsutum
tgtataattaaaatagtaagaggaatcagactaggatactc

SEQ ID NO: 18593 - DNA, 35 bp, Gossypium hirsutum
aggagtcaacaatgaactataaattttaagggatt

SEQ ID NO: 18594 - DNA, 22 bp, Gossypium hirsutum
tgaagagattaaatgagtattt

SEQ ID NO: 18595 - DNA, 20 bp, Gossypium hirsutum
aagagattaaatgggtattt

SEQ ID NO: 18596 - DNA, 23 bp, Gossypium hirsutum
aagagtgttgaccccaaaatggt

SEQ ID NO: 18597 - DNA, 15 bp, Gossypium hirsutum
aggcggcacctgctt

SEQ ID NO: 18598 - DNA, 24 bp, Gossypium hirsutum
ttaaataaaaaaaagttggtttcc

SEQ ID NO: 18599 - DNA, 20 bp, Gossypium hirsutum
ataaaaaaatgttggtttcc

SEQ ID NO: 18600 - DNA, 25 bp, Gossypium hirsutum
ccaaaccagacgagttgaaaagaaa

SEQ ID NO: 18601 - DNA, 33 bp, Gossypium hirsutum
accgaaattaaactattcatcaaaatgattgca

SEQ ID NO: 18602 - DNA, 23 bp, Gossypium hirsutum
aaacatgatttttttttcttttc

SEQ ID NO: 18603 - DNA, 21 bp, Gossypium hirsutum
aacatgattttttttcttttc

SEQ ID NO: 18604 - DNA, 27 bp, Gossypium hirsutum
gcttctttcaccatttgggaaggtata

SEQ ID NO: 18605 - DNA, 25 bp, Gossypium hirsutum
tgcacaaacaggagaaagaaatgga

SEQ ID NO: 18606 - DNA, 18 bp, Gossypium hirsutum
cggtttcaataattttaa

SEQ ID NO: 18607 - DNA, 18 bp, Gossypium hirsutum
cggtttcaataatttaaa

SEQ ID NO: 18608 - DNA, 28 bp, Gossypium hirsutum
catcccatgtaaattttcacaagcttct

SEQ ID NO: 18609 - DNA, 24 bp, Gossypium hirsutum
acactctcatcacctggattggat

SEQ ID NO: 18610 - DNA, 21 bp, Gossypium hirsutum
caaggtagctaataataagaa

SEQ ID NO: 18611 - DNA, 21 bp, Gossypium hirsutum
caaggtagctaatactaagaa

SEQ ID NO: 18612 - DNA, 27 bp, Gossypium hirsutum
gagggaaaaagctgcaaatgaataaga

SEQ ID NO: 18613 - DNA, 25 bp, Gossypium hirsutum
gctctgttgcattgctaaaaacttc

SEQ ID NO: 18614 - DNA, 17 bp, Gossypium hirsutum
aaatccatgaattttgg

SEQ ID NO: 18615 - DNA, 16 bp, Gossypium hirsutum
aatccatgacttttgg

SEQ ID NO: 18616 - DNA, 26 bp, Gossypium hirsutum
gcgcttcagatatcaattttggcata

SEQ ID NO: 18617 - DNA, 25 bp, Gossypium hirsutum
gagttttgttccttggtgctgaaat

SEQ ID NO: 18618 - DNA, 23 bp, Gossypium hirsutum
cctatttatactattcagttctt

SEQ ID NO: 18619 - DNA, 22 bp, Gossypium hirsutum
ctatttatactattgagttctt

SEQ ID NO: 18620 - DNA, 33 bp, Gossypium hirsutum
tcaaggaaccactaagcttaaaaatagaaaaga

SEQ ID NO: 18621 - DNA, 25 bp, Gossypium hirsutum
agcagaagatgaacaaaaggaggtt

SEQ ID NO: 18622 - DNA, 22 bp, Gossypium hirsutum
tttatatgatgtcttaaaatac

SEQ ID NO: 18623 - DNA, 22 bp, Gossypium hirsutum
tttatatgatgtcttaagatac

SEQ ID NO: 18624 - DNA, 30 bp, Gossypium hirsutum
gtttgataccacaagttgtgaaactgattt

SEQ ID NO: 18625 - DNA, 25 bp, Gossypium hirsutum
gacaggaataaagtcggagcagaat

SEQ ID NO: 18626 - DNA, 18 bp, Gossypium hirsutum
actacagcaggccagtta

SEQ ID NO: 18627 - DNA, 17 bp, Gossypium hirsutum
ctacagcaggccggtta

SEQ ID NO: 18628 - DNA, 29 bp, Gossypium hirsutum
ctgcttttatgttatttggacatcatgct

SEQ ID NO: 18629 - DNA, 25 bp, Gossypium hirsutum
gacactgccttaaggtaaacgattc

SEQ ID NO: 18630 - DNA, 21 bp, Gossypium hirsutum
tttctattctttcattattcc

SEQ ID NO: 18631 - DNA, 21 bp, Gossypium hirsutum
tttctattctttctttattcc

SEQ ID NO: 18632 - DNA, 27 bp, Gossypium hirsutum
ccccaacttcctttctaattgtcaatg

SEQ ID NO: 18633 - DNA, 22 bp, Gossypium hirsutum
gccaactgcatgccaatcattt

SEQ ID NO: 18634 - DNA, 17 bp, Gossypium hirsutum
tcttcattcacaaattg

SEQ ID NO: 18635 - DNA, 15 bp, Gossypium hirsutum
ttcattcgcaaattg

SEQ ID NO: 18636 - DNA, 38 bp, Gossypium hirsutum
tcattctaacttttaatacaaacacctccataatactt

SEQ ID NO: 18637 - DNA, 24 bp, Gossypium hirsutum
ccccgtacacaaatccagatatgt

SEQ ID NO: 18638 - DNA, 18 bp, Gossypium hirsutum
cacgggtactttagcaaa

SEQ ID NO: 18639 - DNA, 18 bp, Gossypium hirsutum
cacgggtacttttgcaaa

SEQ ID NO: 18640 - DNA, 27 bp, Gossypium hirsutum
cctttctccaatgttactcttgactct

SEQ ID NO: 18641 - DNA, 27 bp, Gossypium hirsutum
ttgcatcacatctcactacttcaaagt

SEQ ID NO: 18642 - DNA, 15 bp, Gossypium hirsutum
aggcatgcgttacca

SEQ ID NO: 18643 - DNA, 16 bp, Gossypium hirsutum
aaggcatgccttacca

SEQ ID NO: 18644 - DNA, 24 bp, Gossypium hirsutum
cttgcattctaacaagcacacctt

SEQ ID NO: 18645 - DNA, 25 bp, Gossypium hirsutum
cggctactcacctagtcataaagga

SEQ ID NO: 18646 - DNA, 18 bp, Gossypium hirsutum
ttccatgaagaagtgttc

SEQ ID NO: 18647 - DNA, 18 bp, Gossypium hirsutum
ttccatgaagtagtgttc

SEQ ID NO: 18648 - DNA, 22 bp, Gossypium hirsutum
gtgaggtagagctgacgtagga

SEQ ID NO: 18649 - DNA, 39 bp, Gossypium hirsutum
gaaaaaaaattttagaaaaaaagcaagtatgaagtgaga

SEQ ID NO: 18650 - DNA, 17 bp, Gossypium hirsutum
tccgagtacacatagtg

SEQ ID NO: 18651 - DNA, 17 bp, Gossypium hirsutum
tccgagtaaacatagtg

SEQ ID NO: 18652 - DNA, 28 bp, Gossypium hirsutum
ctatcttggacacatacccattcatacc

SEQ ID NO: 18653 - DNA, 26 bp, Gossypium hirsutum
ccaacgtatcaatctcaacctcttca

SEQ ID NO: 18654 - DNA, 15 bp, Gossypium hirsutum
aagaacgctaacgcc

SEQ ID NO: 18655 - DNA, 16 bp, Gossypium hirsutum
caagaactctaacgcc

SEQ ID NO: 18656 - DNA, 24 bp, Gossypium hirsutum
ggatcgtggtgttgacttttgact

SEQ ID NO: 18657 - DNA, 29 bp, Gossypium hirsutum
gcctggtttatatcaaaacgttgagaaat

SEQ ID NO: 18658 - DNA, 22 bp, Gossypium hirsutum
tttgtttggttaaaattttcta

SEQ ID NO: 18659 - DNA, 22 bp, Gossypium hirsutum
tttgtttggttaaatttttcta

SEQ ID NO: 18660 - DNA, 35 bp, Gossypium hirsutum
accaaattaaagtattgggactaaatctacaactt

SEQ ID NO: 18661 - DNA, 27 bp, Gossypium hirsutum
ggagaagtttatgggaaatctgggaat

SEQ ID NO: 18662 - DNA, 14 bp, Gossypium hirsutum
cagcctagaaagtg

SEQ ID NO: 18663 - DNA, 13 bp, Gossypium hirsutum
agcctggaaagtg

SEQ ID NO: 18664 - DNA, 25 bp, Gossypium hirsutum
ggaaagctcatcagaaccataggat

SEQ ID NO: 18665 - DNA, 35 bp, Gossypium hirsutum
agtacttcatatgtgttacattacattcttcactt

SEQ ID NO: 18666 - DNA, 23 bp, Gossypium hirsutum
atttatttgctatagatacaaac

SEQ ID NO: 18667 - DNA, 22 bp, Gossypium hirsutum
tttatttgctataggtacaaac

SEQ ID NO: 18668 - DNA, 28 bp, Gossypium hirsutum
cagtctatagaacaggacagtaaatgca

SEQ ID NO: 18669 - DNA, 27 bp, Gossypium hirsutum
ggttgttaatatagaggatggccttga

SEQ ID NO: 18670 - DNA, 18 bp, Gossypium hirsutum
ctgaagagctacaggcag

SEQ ID NO: 18671 - DNA, 15 bp, Gossypium hirsutum
aagagctgcaggcag

SEQ ID NO: 18672 - DNA, 18 bp, Gossypium hirsutum
cctggcggaatgcatcca

SEQ ID NO: 18673 - DNA, 25 bp, Gossypium hirsutum
cccaattctccacaatgttctgaaa

SEQ ID NO: 18674 - DNA, 20 bp, Gossypium hirsutum
caaaggtaagagagagagtt

SEQ ID NO: 18675 - DNA, 19 bp, Gossypium hirsutum
aaaggtaagagagatagtt

SEQ ID NO: 18676 - DNA, 25 bp, Gossypium hirsutum
cccatcatctgcaagagaattctgt

SEQ ID NO: 18677 - DNA, 25 bp, Gossypium hirsutum
gaaattgatgtggtgtcttgcaagt

SEQ ID NO: 18678 - DNA, 23 bp, Gossypium hirsutum
ttttcttttgaattaagaattta

SEQ ID NO: 18679 - DNA, 21 bp, Gossypium hirsutum
ttcttttgaattaaaaattta

SEQ ID NO: 18680 - DNA, 31 bp, Gossypium hirsutum
gtttaccttttttggtgtttctctttttctc

SEQ ID NO: 18681 - DNA, 25 bp, Gossypium hirsutum
ggcaacacatgggcttttaacaata

SEQ ID NO: 18682 - DNA, 18 bp, Gossypium hirsutum
catttacaagctactttt

SEQ ID NO: 18683 - DNA, 17 bp, Gossypium hirsutum
atttacaggctactttt

SEQ ID NO: 18684 - DNA, 32 bp, Gossypium hirsutum
gaatgctctcttacaggtaacttttacaagat

SEQ ID NO: 18685 - DNA, 24 bp, Gossypium hirsutum
ttaggctatcccctcaagttttcg

SEQ ID NO: 18686 - DNA, 21 bp, Gossypium hirsutum
atcttatgtaactgattagca

SEQ ID NO: 18687 - DNA, 21 bp, Gossypium hirsutum
atcttatgtaactggttagca

SEQ ID NO: 18688 - DNA, 24 bp, Gossypium hirsutum
cttgcttaagctggaaggaattgg

SEQ ID NO: 18689 - DNA, 32 bp, Gossypium hirsutum
ctcctttttctttaggaataagcatcgataga

SEQ ID NO: 18690 - DNA, 21 bp, Gossypium hirsutum
ccttttaggttatcattgacg

SEQ ID NO: 18691 - DNA, 20 bp, Gossypium hirsutum
cttttaggttatcgttgacg

SEQ ID NO: 18692 - DNA, 23 bp, Gossypium hirsutum
acgatttgctcatacctgcacaa

SEQ ID NO: 18693 - DNA, 26 bp, Gossypium hirsutum
ctggttggttgtgtatagaaggttct

SEQ ID NO: 18694 - DNA, 19 bp, Gossypium hirsutum
attcagacatggttacttt

SEQ ID NO: 18695 - DNA, 16 bp, Gossypium hirsutum
cagacatggctacttt

SEQ ID NO: 18696 - DNA, 39 bp, Gossypium hirsutum
accttcttctagaaatagagtttatttaagaatgatgac

SEQ ID NO: 18697 - DNA, 28 bp, Gossypium hirsutum
cgtggtgattgtatgtttagaggttact

SEQ ID NO: 18698 - DNA, 21 bp, Gossypium hirsutum
atttcaatctatgaagaagtt

SEQ ID NO: 18699 - DNA, 17 bp, Gossypium hirsutum
caatctatggagaagtt

SEQ ID NO: 18700 - DNA, 22 bp, Gossypium hirsutum
ccttgttgcaactccaaaccat

SEQ ID NO: 18701 - DNA, 35 bp, Gossypium hirsutum; identical to SEQ ID NO: 16409

SEQ ID NO: 18702 - DNA, 19 bp, Gossypium hirsutum
accaaaacaaaaatttact

SEQ ID NO: 18703 - DNA, 19 bp, Gossypium hirsutum
accaaaacaaaagtttact

SEQ ID NO: 18704 - DNA, 31 bp, Gossypium hirsutum; identical to SEQ ID NO: 16412

SEQ ID NO: 18705 - DNA, 27 bp, Gossypium hirsutum
tctatcaatttcgggtttttgggatct

SEQ ID NO: 18706 - DNA, 17 bp, Gossypium hirsutum
tttttgcatcatttttt

SEQ ID NO: 18707 - DNA, 17 bp, Gossypium hirsutum
tttttgcatcctttttt

SEQ ID NO: 18708 - DNA, 34 bp, Gossypium hirsutum
aggaagaaaaccaaaaacaaatttacaaatgaga

SEQ ID NO: 18709 - DNA, 25 bp, Gossypium hirsutum
cgttcctgcaaaacgaataacagaa

SEQ ID NO: 18710 - DNA, 20 bp, Gossypium hirsutum
ttatggttgcaaatcattat

SEQ ID NO: 18711 - DNA, 20 bp, Gossypium hirsutum
ttatggttgcaaatcgttat

SEQ ID NO: 18712 - DNA, 28 bp, Gossypium hirsutum
tctctttggaaaggagtcaactatgttc

SEQ ID NO: 18713 - DNA, 25 bp, Gossypium hirsutum
cccacagctcaatctttgaaaacat

SEQ ID NO: 18714 - DNA, 17 bp, Gossypium hirsutum
atcatcagccccgcctg

SEQ ID NO: 18715 - DNA, 17 bp, Gossypium hirsutum
atcatcagctccgcctg

SEQ ID NO: 18716 - DNA, 25 bp, Gossypium hirsutum
ccataaccataccaagcaccaaaag

SEQ ID NO: 18717 - DNA, 25 bp, Gossypium hirsutum
cggatccaaatttcatgcactgaga

SEQ ID NO: 18718 - DNA, 17 bp, Gossypium hirsutum
acgatatgggcatactg

SEQ ID NO: 18719 - DNA, 20 bp, Gossypium hirsutum
ttaacgatatgggtatactg

SEQ ID NO: 18720 - DNA, 24 bp, Gossypium hirsutum
gcctccctgtttccaaacagatta

SEQ ID NO: 18721 - DNA, 28 bp, Gossypium hirsutum
ggaaatgcaacaagaagggaaatagatt

SEQ ID NO: 18722 - DNA, 21 bp, Gossypium hirsutum
ccattaacattaagtgataac

SEQ ID NO: 18723 - DNA, 20 bp, Gossypium hirsutum
cattaacattacgtgataac

SEQ ID NO: 18724 - DNA, 24 bp, Gossypium hirsutum
gggcatggactacttaacagtgtt

SEQ ID NO: 18725 - DNA, 26 bp, Gossypium hirsutum
tgcaatcggtatcaaaggaaaagaga

SEQ ID NO: 18726 - DNA, 18 bp, Gossypium hirsutum
cattttctcctgaattat

SEQ ID NO: 18727 - DNA, 18 bp, Gossypium hirsutum
cattttctcctcaattat

SEQ ID NO: 18728 - DNA, 25 bp, Gossypium hirsutum
ctaggcaaacttgaggtctccattt

SEQ ID NO: 18729 - DNA, 21 bp, Gossypium hirsutum
tgctgttgcaccttggtacat

SEQ ID NO: 18730 - DNA, 16 bp, Gossypium hirsutum
ttccaccatggaagtt

SEQ ID NO: 18731 - DNA, 14 bp, Gossypium hirsutum
ccaccagggaagtt

SEQ ID NO: 18732 - DNA, 33 bp, Gossypium hirsutum
caaacttcaaaaaaaattgtacgagtgaaaaga

SEQ ID NO: 18733 - DNA, 22 bp, Gossypium hirsutum
tttgagctgcacagatctcgtt

SEQ ID NO: 18734 - DNA, 19 bp, Gossypium hirsutum
tcagattttaaaaattttg

SEQ ID NO: 18735 - DNA, 18 bp, Gossypium hirsutum
tcagattttaaaattttg

SEQ ID NO: 18736 - DNA, 30 bp, Gossypium hirsutum
ggaaaaagaaaaagagagaacccaaaatga

SEQ ID NO: 18737 - DNA, 28 bp, Gossypium hirsutum
tctccataatcagcaaaattgtcttcct

SEQ ID NO: 18738 - DNA, 18 bp, Gossypium hirsutum
tgaactatctccaaatgg

SEQ ID NO: 18739 - DNA, 16 bp, Gossypium hirsutum
aactatccccaaatgg

SEQ ID NO: 18740 - DNA, 29 bp, Gossypium hirsutum
aggtataatgaagaatctgttgcacaact

SEQ ID NO: 18741 - DNA, 32 bp, Gossypium hirsutum
acattgcagttttatattagttaggccataca

SEQ ID NO: 18742 - DNA, 24 bp, Gossypium hirsutum
aaaggacagtataaaacatagata

SEQ ID NO: 18743 - DNA, 23 bp, Gossypium hirsutum
aaggacagtataaaagatagata

SEQ ID NO: 18744 - DNA, 37 bp, Gossypium hirsutum
tgttggttgttttttttggaaggattatatgaaataa

SEQ ID NO: 18745 - DNA, 30 bp, Gossypium hirsutum
aacatatgtataccttgaactagatgcagc

SEQ ID NO: 18746 - DNA, 13 bp, Gossypium hirsutum
ccccccatattct

SEQ ID NO: 18747 - DNA, 13 bp, Gossypium hirsutum
ccccacatattct

SEQ ID NO: 18748 - DNA, 23 bp, Gossypium hirsutum
ccgctttcaaatcacttgctgaa

SEQ ID NO: 18749 - DNA, 26 bp, Gossypium hirsutum
cacattgcctcttttatgatgcagaa

SEQ ID NO: 18750 - DNA, 21 bp, Gossypium hirsutum
tctttatgtttaccgcaagca

SEQ ID NO: 18751 - DNA, 21 bp, Gossypium hirsutum
tctttatgtttaccacaagca

SEQ ID NO: 18752 - DNA, 25 bp, Gossypium hirsutum
ttttggcaatgtaatgcaccttctc

SEQ ID NO: 18753 - DNA, 27 bp, Gossypium hirsutum
ctggactaggcttgaatcattgtatgt

SEQ ID NO: 18754 - DNA, 21 bp, Gossypium hirsutum
ttatttctcatattcaattct

SEQ ID NO: 18755 - DNA, 15 bp, Gossypium hirsutum
ctcatatgcaattct

SEQ ID NO: 18756 - DNA, 28 bp, Gossypium hirsutum
agtttccttcgagtctcctatagattga

SEQ ID NO: 18757 - DNA, 26 bp, Gossypium hirsutum
agcaattgcagaaatgtcaactgaaa

SEQ ID NO: 18758 - DNA, 23 bp, Gossypium hirsutum
aaatggtagctatattcctttta

SEQ ID NO: 18759 - DNA, 21 bp, Gossypium hirsutum
atggtagctatattactttta

SEQ ID NO: 18760 - DNA, 26 bp, Gossypium hirsutum
agttgtgaaatgaggcagataatggt

SEQ ID NO: 18761 - DNA, 22 bp, Gossypium hirsutum
ggagggaaaggaggaagcaaaa

SEQ ID NO: 18762 - DNA, 15 bp, Gossypium hirsutum
acattcgcattctct

SEQ ID NO: 18763 - DNA, 15 bp, Gossypium hirsutum
acattcgaattctct

SEQ ID NO: 18764 - DNA, 25 bp, Gossypium hirsutum
cccttgttcctcctaagtaccattt

SEQ ID NO: 18765 - DNA, 25 bp, Gossypium hirsutum
gtcacaatcaatatccaccccagat

SEQ ID NO: 18766 - DNA, 17 bp, Gossypium hirsutum
ctatgtgggatattatg

SEQ ID NO: 18767 - DNA, 14 bp, Gossypium hirsutum
tgtgggacattatg

SEQ ID NO: 18768 - DNA, 25 bp, Gossypium hirsutum
aggtgatgtggatgtagtaggttga

SEQ ID NO: 18769 - DNA, 33 bp, Gossypium hirsutum
tcggtatcaatgttttccgttgtaatatttttg

SEQ ID NO: 18770 - DNA, 19 bp, Gossypium hirsutum
attatgcacattggtaaac

SEQ ID NO: 18771 - DNA, 16 bp, Gossypium hirsutum
atgcacattgataaac

SEQ ID NO: 18772 - DNA, 38 bp, Gossypium hirsutum
tttgatttatatgcatgtaattgaagtctatttgcatt

SEQ ID NO: 18773 - DNA, 31 bp, Gossypium hirsutum
tcactgcaaaaagagtactaacaatggatat

SEQ ID NO: 18774 - DNA, 14 bp, Gossypium hirsutum
ctcctcagaaaagc

SEQ ID NO: 18775 - DNA, 14 bp, Gossypium hirsutum
ctcctaagaaaagc

SEQ ID NO: 18776 - DNA, 27 bp, Gossypium hirsutum
tcttcatcaagggatcacatttcaaca

SEQ ID NO: 18777 - DNA, 25 bp, Gossypium hirsutum
gcaataaaaacaggcagcaaatgga

SEQ ID NO: 18778 - DNA, 21 bp, Gossypium hirsutum
ttacctcatttataccttttc

SEQ ID NO: 18779 - DNA, 17 bp, Gossypium hirsutum
ctcatttatgccttttc

SEQ ID NO: 18780 - DNA, 24 bp, Gossypium hirsutum
tgcaagcagccaaagtatagaact

SEQ ID NO: 18781 - DNA, 30 bp, Gossypium hirsutum
cccgtactcttcaaaaatttggaatttagt

SEQ ID NO: 18782 - DNA, 21 bp, Gossypium hirsutum
aagtaaatgagctaacttaat

SEQ ID NO: 18783 - DNA, 18 bp, Gossypium hirsutum
taaatgagctaaattaat

SEQ ID NO: 18784 - DNA, 30 bp, Gossypium hirsutum
cagtgttaacagttgaacctgaatttgaaa

SEQ ID NO: 18785 - DNA, 22 bp, Gossypium hirsutum
ttcttgtagtgccgctaatgct

SEQ ID NO: 18786 - DNA, 18 bp, Gossypium hirsutum
tgagaaaacaccgcaaaa

SEQ ID NO: 18787 - DNA, 18 bp, Gossypium hirsutum
tgagaaaacaccacaaaa

SEQ ID NO: 18788 - DNA, 24 bp, Gossypium hirsutum
aaaaactccgcaaaaagtcaagca

SEQ ID NO: 18789 - DNA, 21 bp, Gossypium hirsutum
gctaagtttgcggcagtaagg

SEQ ID NO: 18790 - DNA, 15 bp, Gossypium hirsutum
taggaagccaaatca

SEQ ID NO: 18791 - DNA, 16 bp, Gossypium hirsutum
ctaggaagacaaatca

SEQ ID NO: 18792 - DNA, 28 bp, Gossypium hirsutum
tgaagttccactgaatctaaaagccatt

SEQ ID NO: 18793 - DNA, 26 bp, Gossypium hirsutum
catagtttggtgttaaatgcctgctt

SEQ ID NO: 18794 - DNA, 22 bp, Gossypium hirsutum
aaatagtagtaacctggagttg

SEQ ID NO: 18795 - DNA, 20 bp, Gossypium hirsutum
atagtagtaacctgaagttg

SEQ ID NO: 18796 - DNA, 25 bp, Gossypium hirsutum
ttgttttggtttctgttggctcttc

SEQ ID NO: 18797 - DNA, 24 bp, Gossypium hirsutum
ccccacatgtctaatcttcagtgt

SEQ ID NO: 18798 - DNA, 25 bp, Gossypium hirsutum
aagtatatgttatgatactaattaa

SEQ ID NO: 18799 - DNA, 21 bp, Gossypium hirsutum
atatgttatggtactaattaa

SEQ ID NO: 18800 - DNA, 25 bp, Gossypium hirsutum
caccactacatagcgaggtctttaa

SEQ ID NO: 18801 - DNA, 19 bp, Gossypium hirsutum
ccggaggatgtgtgctaca

SEQ ID NO: 18802 - DNA, 19 bp, Gossypium hirsutum
aaagttttttttgaatttc

SEQ ID NO: 18803 - DNA, 17 bp, Gossypium hirsutum
aagtttttttgaatttc

SEQ ID NO: 18804 - DNA, 50 bp, Gossypium hirsutum
cctttaaaaattaaaacataaaaattaaatctcaaatccatgctatatac

SEQ ID NO: 18805 - DNA, 22 bp, Gossypium hirsutum
agcctctaccctacaagtgtgt

SEQ ID NO: 18806 - DNA, 22 bp, Gossypium hirsutum
ctgttctacttctatatttgga

SEQ ID NO: 18807 - DNA, 22 bp, Gossypium hirsutum
ctgttctacttctatatatgga

SEQ ID NO: 18808 - DNA, 25 bp, Gossypium hirsutum
gcactttgctttgactcagattctt

SEQ ID NO: 18809 - DNA, 25 bp, Gossypium hirsutum
tggaacatccaaagaacatccttgt

SEQ ID NO: 18810 - DNA, 19 bp, Gossypium hirsutum
acattgattcatacctttc

SEQ ID NO: 18811 - DNA, 17 bp, Gossypium hirsutum
attgattcatgcctttc

SEQ ID NO: 18812 - DNA, 26 bp, Gossypium hirsutum
aaaggacattgtcaagcttcaacatg

SEQ ID NO: 18813 - DNA, 24 bp, Gossypium hirsutum
ggtccagacatgagttgtaaagca

SEQ ID NO: 18814 - DNA, 17 bp, Gossypium hirsutum
caatagccccacgattt

SEQ ID NO: 18815 - DNA, 15 bp, Gossypium hirsutum
atagccccgcgattt

SEQ ID NO: 18816 - DNA, 18 bp, Gossypium hirsutum
gcggagttcgggtaacga

SEQ ID NO: 18817 - DNA, 32 bp, Gossypium hirsutum
actccgatgtaaatcttgattactagcaattt

SEQ ID NO: 18818 - DNA, 16 bp, Gossypium hirsutum
acacacgtgagtagac

SEQ ID NO: 18819 - DNA, 16 bp, Gossypium hirsutum
acacacgtgtgtagac

SEQ ID NO: 18820 - DNA, 31 bp, Gossypium hirsutum
ggtatcgctccatttacagttttttcttttt

SEQ ID NO: 18821 - DNA, 34 bp, Gossypium hirsutum
gatggagctaccattgactaataatttagagatt

SEQ ID NO: 18822 - DNA, 25 bp, Gossypium hirsutum
ttatgttaaaagaaaatatttatcc

SEQ ID NO: 18823 - DNA, 22 bp, Gossypium hirsutum
tgttaaaagaaaatctttatcc

SEQ ID NO: 18824 - DNA, 28 bp, Gossypium hirsutum
acattgtgcaaataatgaaagacgttgt

SEQ ID NO: 18825 - DNA, 34 bp, Gossypium hirsutum
cgactgaaacgtttttaagttatatgaaagttga

SEQ ID NO: 18826 - DNA, 17 bp, Gossypium hirsutum
tcaaccaccatcacatc

SEQ ID NO: 18827 - DNA, 16 bp, Gossypium hirsutum
caaccaccaccacatc

SEQ ID NO: 18828 - DNA, 22 bp, Gossypium hirsutum
acagtagggcaaaacacccaaa

SEQ ID NO: 18829 - DNA, 21 bp, Gossypium hirsutum
gccaatctccgacacacaaaa

SEQ ID NO: 18830 - DNA, 20 bp, Gossypium hirsutum
aaagagtgaagtgttcaaat

SEQ ID NO: 18831 - DNA, 20 bp, Gossypium hirsutum
aaagagtgaagtattcaaat

SEQ ID NO: 18832 - DNA, 27 bp, Gossypium hirsutum
tttctccttcaaaagcagggtctattt

SEQ ID NO: 18833 - DNA, 25 bp, Gossypium hirsutum
gcgctcaactgaattagcaattgtc

SEQ ID NO: 18834 - DNA, 15 bp, Gossypium hirsutum
cctcaacggcatcat

SEQ ID NO: 18835 - DNA, 17 bp, Gossypium hirsutum
aacctcaacagcatcat

SEQ ID NO: 18836 - DNA, 27 bp, Gossypium hirsutum
agtcacaatcgtgagaaatgaatgaca

SEQ ID NO: 18837 - DNA, 30 bp, Gossypium hirsutum
cagcttttagcaaatagattgaaattgggt

SEQ ID NO: 18838 - DNA, 16 bp, Gossypium hirsutum
ctgaggtaatcaaaac

SEQ ID NO: 18839 - DNA, 15 bp, Gossypium hirsutum
tgaggtaagcaaaac

SEQ ID NO: 18840 - DNA, 24 bp, Gossypium hirsutum
tggaaactgtggacaaggatgaag

SEQ ID NO: 18841 - DNA, 29 bp, Gossypium hirsutum
tccgtaaaatagaatttgctcaggatcat

SEQ ID NO: 18842 - DNA, 19 bp, Gossypium hirsutum
ctagaagctttgctagaac

SEQ ID NO: 18843 - DNA, 18 bp, Gossypium hirsutum
ctagaagcttgctagaac

SEQ ID NO: 18844 - DNA, 25 bp, Gossypium hirsutum
atggcagctgttcttctaagtatcg

SEQ ID NO: 18845 - DNA, 21 bp, Gossypium hirsutum
ggcagtgctgatgcattgaag

SEQ ID NO: 18846 - DNA, 14 bp, Gossypium hirsutum
caagcggatgctca

SEQ ID NO: 18847 - DNA, 14 bp, Gossypium hirsutum
caagcgggtgctca

SEQ ID NO: 18848 - DNA, 26 bp, Gossypium hirsutum
gaagggcacatttaggatcaatctca

SEQ ID NO: 18849 - DNA, 25 bp, Gossypium hirsutum
tgctaccacatcactgctctactta

SEQ ID NO: 18850 - DNA, 19 bp, Gossypium hirsutum
ttttcttacatgcttttgc

SEQ ID NO: 18851 - DNA, 21 bp, Gossypium hirsutum
ttttttcttacattcttttgc

SEQ ID NO: 18852 - DNA, 25 bp, Gossypium hirsutum
ggtgaatgggaagtgttaagagaga

SEQ ID NO: 18853 - DNA, 29 bp, Gossypium hirsutum
agaaaagcataatgccttgttgtttaaca

SEQ ID NO: 18854 - DNA, 17 bp, Gossypium hirsutum
catgctaattagatttt

SEQ ID NO: 18855 - DNA, 16 bp, Gossypium hirsutum
atgctaatgagatttt

SEQ ID NO: 18856 - DNA, 26 bp, Gossypium hirsutum
actccaacctaaacacctctacttct

SEQ ID NO: 18857 - DNA, 27 bp, Gossypium hirsutum
tggaactccttcaggaatatcctacaa

SEQ ID NO: 18858 - DNA, 24 bp, Gossypium hirsutum
caactctgtaaatatataaactat

SEQ ID NO: 18859 - DNA, 24 bp, Gossypium hirsutum
caactctgtaaatatatatactat

SEQ ID NO: 18860 - DNA, 50 bp, Gossypium hirsutum
gatctttagtattttacctaataatcaatttaatgtgttataaactgtta

SEQ ID NO: 18861 - DNA, 45 bp, Gossypium hirsutum
tcgtatctttttgtacaattaatattttaagtattcaattgttga

SEQ ID NO: 18862 - DNA, 15 bp, Gossypium hirsutum
caaccgttggaattt

SEQ ID NO: 18863 - DNA, 15 bp, Gossypium hirsutum
caaccgttagaattt

SEQ ID NO: 18864 - DNA, 28 bp, Gossypium hirsutum
tgatccaatgtctctattgtaccgatct

SEQ ID NO: 18865 - DNA, 26 bp, Gossypium hirsutum
cccctgtttacgaggctatctattct

SEQ ID NO: 18866 - DNA, 23 bp, Gossypium hirsutum
ctagaatatatacatgaaatgaa

SEQ ID NO: 18867 - DNA, 23 bp, Gossypium hirsutum
ctagaatatatacataaaatgaa

SEQ ID NO: 18868 - DNA, 22 bp, Gossypium hirsutum
ggtttggcccagtgactagaag

SEQ ID NO: 18869 - DNA, 25 bp, Gossypium hirsutum
ggcttagccttctcctattttacca

SEQ ID NO: 18870 - DNA, 22 bp, Gossypium hirsutum
cattttgtaattgaaatttatt

SEQ ID NO: 18871 - DNA, 21 bp, Gossypium hirsutum
cattttgtaattgaatttatt

SEQ ID NO: 18872 - DNA, 48 bp, Gossypium hirsutum
atttagaactgtttaggtagatgtactaattttctagtatacatatta

SEQ ID NO: 18873 - DNA, 41 bp, Gossypium hirsutum
ccatttctttatttaaaaaaatggagaattgtggtttattt

SEQ ID NO: 18874 - DNA, 26 bp, Gossypium hirsutum
atttggtaaaaaataaaaaaacatat

SEQ ID NO: 18875 - DNA, 24 bp, Gossypium hirsutum
tttggtaaaaaataaaaaacatat

SEQ ID NO: 18876 - DNA, 19 bp, Gossypium hirsutum
ccagccaatgacgcctaga

SEQ ID NO: 18877 - DNA, 27 bp, Gossypium hirsutum
actaaaagttgatatccactccatgcc

SEQ ID NO: 18878 - DNA, 18 bp, Gossypium hirsutum
attttttttccaaaaatg

SEQ ID NO: 18879 - DNA, 20 bp, Gossypium hirsutum
caattttttttcctaaaatg

SEQ ID NO: 18880 - DNA, 42 bp, Gossypium hirsutum
ctcaatttagtattagaaactaaatgttaatgtgtttaaggg

SEQ ID NO: 18881 - DNA, 26 bp, Gossypium hirsutum
actaggcattgaagtaaaaactggct

SEQ ID NO: 18882 - DNA, 22 bp, Gossypium hirsutum
ctagtaactgatttatattttg

SEQ ID NO: 18883 - DNA, 18 bp, Gossypium hirsutum
taactgatttaaattttg

SEQ ID NO: 18884 - DNA, 26 bp, Gossypium hirsutum
catgcaacaaagtgataatgctccta

SEQ ID NO: 18885 - DNA, 45 bp, Gossypium hirsutum
actttctttttgctcactattatgttgttattatttttttataca

SEQ ID NO: 18886 - DNA, 20 bp, Gossypium hirsutum
taaaatttgagctaaatcgt

SEQ ID NO: 18887 - DNA, 14 bp, Gossypium hirsutum
ttgagccaaatcgt

SEQ ID NO: 18888 - DNA, 32 bp, Gossypium hirsutum
aggcctatttattagttttgggtttagttcaa

SEQ ID NO: 18889 - DNA, 28 bp, Gossypium hirsutum
tccaaaagtcacgctagttttagcttta

SEQ ID NO: 18890 - DNA, 24 bp, Gossypium hirsutum
aatgagttaatttcaaactattta

SEQ ID NO: 18891 - DNA, 22 bp, Gossypium hirsutum
tgagttaatttcaaaatattta

SEQ ID NO: 18892 - DNA, 24 bp, Gossypium hirsutum
tccttaaccactcggacatatcga

SEQ ID NO: 18893 - DNA, 27 bp, Gossypium hirsutum
gcacaaacaacgttttaaaatgccaaa

SEQ ID NO: 18894 - DNA, 18 bp, Gossypium hirsutum
aaggagtgattgcttatg

SEQ ID NO: 18895 - DNA, 21 bp, Gossypium hirsutum
ataaaggagtgatttcttatg

SEQ ID NO: 18896 - DNA, 25 bp, Gossypium hirsutum
cataggccagcaaacatgatgaatt

SEQ ID NO: 18897 - DNA, 25 bp, Gossypium hirsutum
tcgaggagggagttgatgtgttata

SEQ ID NO: 18898 - DNA, 16 bp, Gossypium hirsutum
cagcttgcatatatat

SEQ ID NO: 18899 - DNA, 16 bp, Gossypium hirsutum
cagcttgcgtatatat

SEQ ID NO: 18900 - DNA, 23 bp, Gossypium hirsutum
gccctgactctaacccaactttt

SEQ ID NO: 18901 - DNA, 27 bp, Gossypium hirsutum
gcattgtatctctcactagcatcttca

SEQ ID NO: 18902 - DNA, 14 bp, Gossypium hirsutum
cacgcgtgttagct

SEQ ID NO: 18903 - DNA, 14 bp, Gossypium hirsutum
cacgcgtattagct

SEQ ID NO: 18904 - DNA, 20 bp, Gossypium hirsutum
caccccattgctcgactcaa

SEQ ID NO: 18905 - DNA, 42 bp, Gossypium hirsutum
tttctcaaatgaagtctaagagataaatttttcaatctttac

SEQ ID NO: 18906 - DNA, 24 bp, Gossypium hirsutum
tttactgatttgtttttataaata

SEQ ID NO: 18907 - DNA, 20 bp, Gossypium hirsutum
ctgatttgtttttaaaaata

SEQ ID NO: 18908 - DNA, 26 bp, Gossypium hirsutum
agtgtcaatattttttggcttggagc

SEQ ID NO: 18909 - DNA, 22 bp, Gossypium hirsutum
ggcttgtttcttgggtctgaga

SEQ ID NO: 18910 - DNA, 16 bp, Gossypium hirsutum
cactccccgtcgtacc

SEQ ID NO: 18911 - DNA, 16 bp, Gossypium hirsutum
cactccccatcgtacc

SEQ ID NO: 18912 - DNA, 22 bp, Gossypium hirsutum
gcgttgcgacccatagataatg

SEQ ID NO: 18913 - DNA, 36 bp, Gossypium hirsutum
ttttcagcttaatttctgacttcttttattgacatt

SEQ ID NO: 18914 - DNA, 21 bp, Gossypium hirsutum
aaaatgcaaaaaaatttaaag

SEQ ID NO: 18915 - DNA, 21 bp, Gossypium hirsutum
aaaatgcaaaaaattttaaag

SEQ ID NO: 18916 - DNA, 30 bp, Gossypium hirsutum
tttgtccttgaatttggattgcattaaagt

SEQ ID NO: 18917 - DNA, 28 bp, Gossypium hirsutum
gcgtcaaaaaggaaaaagaaaaacagtt

SEQ ID NO: 18918 - DNA, 21 bp, Gossypium hirsutum
tcagtattttcttctaattcg

SEQ ID NO: 18919 - DNA, 20 bp, Gossypium hirsutum
cagtattttcttcttattcg

SEQ ID NO: 18920 - DNA, 29 bp, Gossypium hirsutum
tcgagtgataacagccatttagaaattca

SEQ ID NO: 18921 - DNA, 23 bp, Gossypium hirsutum
gttgaacctgaagctctgtacga

SEQ ID NO: 18922 - DNA, 21 bp, Gossypium hirsutum
accgaatttatacgacgacgt

SEQ ID NO: 18923 - DNA, 21 bp, Gossypium hirsutum
accgaatttatacaacgacgt

SEQ ID NO: 18924 - DNA, 21 bp, Gossypium hirsutum
cgccgttgagttggtctagtt

SEQ ID NO: 18925 - DNA, 24 bp, Gossypium hirsutum
gggtgataccatgcgttgaatttt

SEQ ID NO: 18926 - DNA, 19 bp, Gossypium hirsutum
ctatggcgttttgtataat

SEQ ID NO: 18927 - DNA, 18 bp, Gossypium hirsutum
ctatggcgtttgtataat

SEQ ID NO: 18928 - DNA, 25 bp, Gossypium hirsutum
cgtgatgttaattgtgtgccgtaat

SEQ ID NO: 18929 - DNA, 40 bp, Gossypium hirsutum
ccactataagtctttacgttatgtttgatatattacacat

SEQ ID NO: 18930 - DNA, 26 bp, Gossypium hirsutum
ttttagactaacataatgtatatgat

SEQ ID NO: 18931 - DNA, 20 bp, Gossypium hirsutum
actaacataatgcatatgat

SEQ ID NO: 18932 - DNA, 32 bp, Gossypium hirsutum
gataaacttgaccaaagaccgatagataatga

SEQ ID NO: 18933 - DNA, 25 bp, Gossypium hirsutum
gcaataaatcgcaaggaaatgcaaa

SEQ ID NO: 18934 - DNA, 22 bp, Gossypium hirsutum
aaaatttttagaagttgatttc

SEQ ID NO: 18935 - DNA, 19 bp, Gossypium hirsutum
atttttagaaggtgatttc

SEQ ID NO: 18936 - DNA, 26 bp, Gossypium hirsutum
agaggacgaacgcatattgaatacaa

SEQ ID NO: 18937 - DNA, 27 bp, Gossypium hirsutum
ctttgatggttctagttgcatgtagga

SEQ ID NO: 18938 - DNA, 22 bp, Gossypium hirsutum
aagcttctttttttatggtttt

SEQ ID NO: 18939 - DNA, 20 bp, Gossypium hirsutum
agcttcttttttatggtttt

SEQ ID NO: 18940 - DNA, 25 bp, Gossypium hirsutum
gcatacacccttttagacctggaaa

SEQ ID NO: 18941 - DNA, 26 bp, Gossypium hirsutum
cctcagcttcagatgattctctactg

SEQ ID NO: 18942 - DNA, 20 bp, Gossypium hirsutum
ttgagtggttattaaaggaa

SEQ ID NO: 18943 - DNA, 20 bp, Gossypium hirsutum
ttgagtggttatttaaggaa

SEQ ID NO: 18944 - DNA, 24 bp, Gossypium hirsutum
tcacggaaagttgatggtaatgca

SEQ ID NO: 18945 - DNA, 21 bp, Gossypium hirsutum
gaatggcaaatgcgggatgat

SEQ ID NO: 18946 - DNA, 18 bp, Gossypium hirsutum
taacctttgctcattcta

SEQ ID NO: 18947 - DNA, 16 bp, Gossypium hirsutum
acctttgctaattcta

SEQ ID NO: 18948 - DNA, 19 bp, Gossypium hirsutum
tgctaggtggcccttgaac

SEQ ID NO: 18949 - DNA, 31 bp, Gossypium hirsutum
ctgatgaataattttgagttttgtcctcaca

SEQ ID NO: 18950 - DNA, 15 bp, Gossypium hirsutum
ctcaacagcaactca

SEQ ID NO: 18951 - DNA, 16 bp, Gossypium hirsutum
actcaacaacaactca

SEQ ID NO: 18952 - DNA, 50 bp, Gossypium hirsutum
gattagatgataagatgaatgaattttcattatcatattttaaagagtta

SEQ ID NO: 18953 - DNA, 24 bp, Gossypium hirsutum
acccgagcccataaaacactaaaa

SEQ ID NO: 18954 - DNA, 16 bp, Gossypium hirsutum
cataaaagcggtgccc

SEQ ID NO: 18955 - DNA, 17 bp, Gossypium hirsutum
ccataaaagctgtgccc

SEQ ID NO: 18956 - DNA, 22 bp, Gossypium hirsutum
gcccgtttagaaaatgggatgg

SEQ ID NO: 18957 - DNA, 24 bp, Gossypium hirsutum
ccaagtattgcaatgcctgcatat

SEQ ID NO: 18958 - DNA, 16 bp, Gossypium hirsutum
catcaaaggacttctc

SEQ ID NO: 18959 - DNA, 16 bp, Gossypium hirsutum
catcaaaagacttctc

SEQ ID NO: 18960 - DNA, 22 bp, Gossypium hirsutum
tttggattctctggcggttgaa

SEQ ID NO: 18961 - DNA, 25 bp, Gossypium hirsutum
cttcagaaatgcctatagccagagt

SEQ ID NO: 18962 - DNA, 20 bp, Gossypium hirsutum
caattgaggagttgtggaaa

SEQ ID NO: 18963 - DNA, 20 bp, Gossypium hirsutum
caattgaggagttatggaaa

SEQ ID NO: 18964 - DNA, 25 bp, Gossypium hirsutum
gcccgaataaagttacaaggtgaac

SEQ ID NO: 18965 - DNA, 24 bp, Gossypium hirsutum
gtgctttcttctcttgggagtagt

SEQ ID NO: 18966 - DNA, 18 bp, Gossypium hirsutum
ccagaatgaggtgtcaaa

SEQ ID NO: 18967 - DNA, 18 bp, Gossypium hirsutum
ccagaatgagttgtcaaa

SEQ ID NO: 18968 - DNA, 25 bp, Gossypium hirsutum
tggaaagcgtttaagtcctgagttt

SEQ ID NO: 18969 - DNA, 31 bp, Gossypium hirsutum
cagttgcaagttttttgtctcagtataatgt

SEQ ID NO: 18970 - DNA, 17 bp, Gossypium hirsutum
caactgacaagctatca

SEQ ID NO: 18971 - DNA, 17 bp, Gossypium hirsutum
caactgacaacctatca

SEQ ID NO: 18972 - DNA, 25 bp, Gossypium hirsutum
gtcatgtggcctacttggtagaaaa

SEQ ID NO: 18973 - DNA, 34 bp, Gossypium hirsutum
aatcttatctacctgtggaatatttttgaggaag

SEQ ID NO: 18974 - DNA, 16 bp, Gossypium hirsutum
aaatgttgggaaaata

SEQ ID NO: 18975 - DNA, 18 bp, Gossypium hirsutum
tcaaatgttaggaaaata

SEQ ID NO: 18976 - DNA, 18 bp, Gossypium hirsutum
gtttgacgcagccgttgg

SEQ ID NO: 18977 - DNA, 23 bp, Gossypium hirsutum
cctgatccaactggttcaaagca

SEQ ID NO: 18978 - DNA, 18 bp, Gossypium hirsutum
ttcacatcaagattcgac

SEQ ID NO: 18979 - DNA, 19 bp, Gossypium hirsutum
cttcacatcaatattcgac

SEQ ID NO: 18980 - DNA, 29 bp, Gossypium hirsutum
tgaattagattgaatcggttcgatcaaga

SEQ ID NO: 18981 - DNA, 30 bp, Gossypium hirsutum
gagaaaagagaagaataggtacacactcaa

SEQ ID NO: 18982 - DNA, 16 bp, Gossypium hirsutum
aacaggaaggcacctc

SEQ ID NO: 18983 - DNA, 15 bp, Gossypium hirsutum
acaggaacgcacctc

SEQ ID NO: 18984 - DNA, 50 bp, Gossypium hirsutum
tgttctagaattttgttaaaaggtatatattggatttttatatacatagt

SEQ ID NO: 18985 - DNA, 26 bp, Gossypium hirsutum
gatgtttcccattcaagtttcaacga

SEQ ID NO: 18986 - DNA, 19 bp, Gossypium hirsutum
cgtaatatctcgcgtaaat

SEQ ID NO: 18987 - DNA, 21 bp, Gossypium hirsutum
atcgtaatatctcacgtaaat

SEQ ID NO: 18988 - DNA, 27 bp, Gossypium hirsutum
gtatggcatctacacgtactaaaacca

SEQ ID NO: 18989 - DNA, 26 bp, Gossypium hirsutum
tctttgattttgggctgttctctctt

SEQ ID NO: 18990 - DNA, 20 bp, Gossypium hirsutum
aaccatgatttttttctttg

SEQ ID NO: 18991 - DNA, 18 bp, Gossypium hirsutum
accatgattttttctttg

SEQ ID NO: 18992 - DNA, 26 bp, Gossypium hirsutum
ccatgatggtgaactagggaatttct

SEQ ID NO: 18993 - DNA, 21 bp, Gossypium hirsutum
gtacgggtacctgcatgcata

SEQ ID NO: 18994 - DNA, 20 bp, Gossypium hirsutum
ttctcattcccttagttaat

SEQ ID NO: 18995 - DNA, 17 bp, Gossypium hirsutum
tcattccctcagttaat

SEQ ID NO: 18996 - DNA, 26 bp, Gossypium hirsutum
tgatttcattgctgggtgaatcttct

SEQ ID NO: 18997 - DNA, 21 bp, Gossypium hirsutum
aacgcaagagaggatgtgctt

SEQ ID NO: 18998 - DNA, 18 bp, Gossypium hirsutum
ccaatactggtttcatca

SEQ ID NO: 18999 - DNA, 17 bp, Gossypium hirsutum
caatactggtgtcatca

SEQ ID NO: 19000 - DNA, 25 bp, Gossypium hirsutum
ggtgtatgtctgttcttccgttagt

SEQ ID NO: 19001 - DNA, 26 bp, Gossypium hirsutum
tcagtgatttaaccaatggtccgatt

SEQ ID NO: 19002 - DNA, 16 bp, Gossypium hirsutum
cctccatggtactttt

SEQ ID NO: 19003 - DNA, 16 bp, Gossypium hirsutum
cctccatgatactttt

SEQ ID NO: 19004 - DNA, 33 bp, Gossypium hirsutum
gtaaatgggacaaaatgtaatatgactcctagt

SEQ ID NO: 19005 - DNA, 29 bp, Gossypium hirsutum
aggtagatgggataaaagataggtcacaa

SEQ ID NO: 19006 - DNA, 24 bp, Gossypium hirsutum
atatacataaactaggttaaggtt

SEQ ID NO: 19007 - DNA, 19 bp, Gossypium hirsutum
cataaactaggtaaaggtt

SEQ ID NO: 19008 - DNA, 22 bp, Gossypium hirsutum
caggcggattatgtgtgaagtg

SEQ ID NO: 19009 - DNA, 25 bp, Gossypium hirsutum
ccttccagcttctgatcagtcaaaa

SEQ ID NO: 19010 - DNA, 16 bp, Gossypium hirsutum
ctccagggtaagaata

SEQ ID NO: 19011 - DNA, 13 bp, Gossypium hirsutum
cagggcaagaata

SEQ ID NO: 19012 - DNA, 27 bp, Gossypium hirsutum
ctctgctttccaatccatgttcctata

SEQ ID NO: 19013 - DNA, 27 bp, Gossypium hirsutum
gctcaaaatgctattcgattcaactga

SEQ ID NO: 19014 - DNA, 13 bp, Gossypium hirsutum
tccgggtgctctt

SEQ ID NO: 19015 - DNA, 14 bp, Gossypium hirsutum
ctccggatgctctt

SEQ ID NO: 19016 - DNA, 25 bp, Gossypium hirsutum
tgtctcaattcctgaggcataggta

SEQ ID NO: 19017 - DNA, 26 bp, Gossypium hirsutum
gctgaactgaaaaaatcctccaggta

SEQ ID NO: 19018 - DNA, 17 bp, Gossypium hirsutum
attcttcgggttccttt

SEQ ID NO: 19019 - DNA, 15 bp, Gossypium hirsutum
tcttcgggatccttt

SEQ ID NO: 19020 - DNA, 23 bp, Gossypium hirsutum
gtttctccacctcctgcaaaatg

SEQ ID NO: 19021 - DNA, 25 bp, Gossypium hirsutum
catcttcgattgtttgccaacactt

SEQ ID NO: 19022 - DNA, 14 bp, Gossypium hirsutum
accaggagaagatg

SEQ ID NO: 19023 - DNA, 13 bp, Gossypium hirsutum
ccaggaaaagatg

SEQ ID NO: 19024 - DNA, 18 bp, Gossypium hirsutum
gccacgggaccaacaaag

SEQ ID NO: 19025 - DNA, 31 bp, Gossypium hirsutum
tgtcacagtctagtttatattagtcctctgt

SEQ ID NO: 19026 - DNA, 20 bp, Gossypium hirsutum
ataaaaagtgttgaatactc

SEQ ID NO: 19027 - DNA, 23 bp, Gossypium hirsutum
taaataaaaagtattgaatactc

SEQ ID NO: 19028 - DNA, 32 bp, Gossypium hirsutum
gttgaaaattcctcacgtgtagaatatgttta

SEQ ID NO: 19029 - DNA, 27 bp, Gossypium hirsutum
agaagacggaaaaaggcagataagttt

SEQ ID NO: 19030 - DNA, 20 bp, Gossypium hirsutum
ccaaacaattaaattttagc

SEQ ID NO: 19031 - DNA, 19 bp, Gossypium hirsutum
caaacaattaaaatttagc

SEQ ID NO: 19032 - DNA, 32 bp, Gossypium hirsutum
agaaacaaacaaaaacaaaaattcttacccct

SEQ ID NO: 19033 - DNA, 26 bp, Gossypium hirsutum
cgaaatgatccaaacccaatttgact

SEQ ID NO: 19034 - DNA, 21 bp, Gossypium hirsutum
tcattttaagtttggattatt

SEQ ID NO: 19035 - DNA, 23 bp, Gossypium hirsutum
aatcattttaagtttagattatt

SEQ ID NO: 19036 - DNA, 38 bp, Gossypium hirsutum
ccaacttaatcttttattggtttcatgtttttctaact

SEQ ID NO: 19037 - DNA, 24 bp, Gossypium hirsutum
tcgtgtacggtgggtatcttagag

SEQ ID NO: 19038 - DNA, 15 bp, Gossypium hirsutum
catcaccagcaaaac

SEQ ID NO: 19039 - DNA, 15 bp, Gossypium hirsutum
catcacctgcaaaac

SEQ ID NO: 19040 - DNA, 26 bp, Gossypium hirsutum
acttttagccataagaaggctgttct

SEQ ID NO: 19041 - DNA, 31 bp, Gossypium hirsutum
agaccaagaaatatgttggtgcatatatcaa

SEQ ID NO: 19042 - DNA, 15 bp, Gossypium hirsutum
caattgccgttcttt

SEQ ID NO: 19043 - DNA, 15 bp, Gossypium hirsutum
caattgcagttcttt

SEQ ID NO: 19044 - DNA, 20 bp, Gossypium hirsutum
gctgaacagaccgcatcatc

SEQ ID NO: 19045 - DNA, 24 bp, Gossypium hirsutum
aacatatcgcattggtgagtcagt

SEQ ID NO: 19046 - DNA, 16 bp, Gossypium hirsutum
ctcttggaaatattcc

SEQ ID NO: 19047 - DNA, 15 bp, Gossypium hirsutum
tcttggaaacattcc

SEQ ID NO: 19048 - DNA, 22 bp, Gossypium hirsutum
cttgtagcccatcaaggaagca

SEQ ID NO: 19049 - DNA, 22 bp, Gossypium hirsutum
cgatcgaaattcacacccgttc

SEQ ID NO: 19050 - DNA, 23 bp, Gossypium hirsutum
aaattaaaattgagtaatttttt

SEQ ID NO: 19051 - DNA, 18 bp, Gossypium hirsutum
aaaattgagtgatttttt

SEQ ID NO: 19052 - DNA, 30 bp, Gossypium hirsutum
caaatcttagtttttgatgggcataatgga

SEQ ID NO: 19053 - DNA, 37 bp, Gossypium hirsutum
gccaaaacaatgatttttatcattagtgatagaagaa

SEQ ID NO: 19054 - DNA, 20 bp, Gossypium hirsutum
tcatatttctccctcttttt

SEQ ID NO: 19055 - DNA, 19 bp, Gossypium hirsutum
catatttctccatcttttt

SEQ ID NO: 19056 - DNA, 27 bp, Gossypium hirsutum
gctcgcaggatcagagttttatataca

SEQ ID NO: 19057 - DNA, 25 bp, Gossypium hirsutum
tcaaatgcgctgaaatgctttatcc

SEQ ID NO: 19058 - DNA, 24 bp, Gossypium hirsutum
actataggtagttttagacagaat

SEQ ID NO: 19059 - DNA, 23 bp, Gossypium hirsutum
ctataggtagttttaggcagaat

SEQ ID NO: 19060 - DNA, 47 bp, Gossypium hirsutum
gctagtttacttttatttagaataaaaaaaaatgagttctgagattt

SEQ ID NO: 19061 - DNA, 23 bp, Gossypium hirsutum
tgtcatccaacaccaatcttgct

SEQ ID NO: 19062 - DNA, 20 bp, Gossypium hirsutum
attgaaacgtgtagttggat

SEQ ID NO: 19063 - DNA, 18 bp, Gossypium hirsutum
tgaaacgtgtaattggat

SEQ ID NO: 19064 - DNA, 25 bp, Gossypium hirsutum
gcaaatgtggccctgaaaatgttaa

SEQ ID NO: 19065 - DNA, 23 bp, Gossypium hirsutum
gaccgcacctaattctgtttgtg

SEQ ID NO: 19066 - DNA, 16 bp, Gossypium hirsutum
acattcatggaaactt

SEQ ID NO: 19067 - DNA, 17 bp, Gossypium hirsutum
cacattcatagaaactt

SEQ ID NO: 19068 - DNA, 27 bp, Gossypium hirsutum
cacacacgtaactcattttttgtcaca

SEQ ID NO: 19069 - DNA, 32 bp, Gossypium hirsutum
gaaggttcggtactctttttaaagttaagaga

SEQ ID NO: 19070 - DNA, 23 bp, Gossypium hirsutum
atcataaagttttcccctggatc

SEQ ID NO: 19071 - DNA, 21 bp, Gossypium hirsutum
cataaagttttcccccggatc

SEQ ID NO: 19072 - DNA, 26 bp, Gossypium hirsutum
gcttcttccatgaccttcaaatatgc

SEQ ID NO: 19073 - DNA, 27 bp, Gossypium hirsutum
tccgaaaaataatgtttggccaatgac

SEQ ID NO: 19074 - DNA, 17 bp, Gossypium hirsutum
atcaatggcaggtatag

SEQ ID NO: 19075 - DNA, 15 bp, Gossypium hirsutum
caatggcgggtatag

SEQ ID NO: 19076 - DNA, 21 bp, Gossypium hirsutum
gcgctttccacatctcaaacc

SEQ ID NO: 19077 - DNA, 30 bp, Gossypium hirsutum
gtggaagttaatctactgatttcttttgca

SEQ ID NO: 19078 - DNA, 16 bp, Gossypium hirsutum
tctgcaatggagattt

SEQ ID NO: 19079 - DNA, 15 bp, Gossypium hirsutum
ctgcaatgaagattt

SEQ ID NO: 19080 - DNA, 26 bp, Gossypium hirsutum
gggaataatgtcactccaatgtccaa

SEQ ID NO: 19081 - DNA, 19 bp, Gossypium hirsutum
ccccatgaagccgagaagt

SEQ ID NO: 19082 - DNA, 17 bp, Gossypium hirsutum
atttggagttagaatcc

SEQ ID NO: 19083 - DNA, 16 bp, Gossypium hirsutum
tttggagtaagaatcc

SEQ ID NO: 19084 - DNA, 27 bp, Gossypium hirsutum
gaacacatgcacaaattccttacagat

SEQ ID NO: 19085 - DNA, 25 bp, Gossypium hirsutum
gccgaatgcattggtacgtattttc

SEQ ID NO: 19086 - DNA, 19 bp, Gossypium hirsutum
ccaaatatcacataaggac

SEQ ID NO: 19087 - DNA, 19 bp, Gossypium hirsutum
ccaaatatcacttaaggac

SEQ ID NO: 19088 - DNA, 24 bp, Gossypium hirsutum
tcatccctgtgtttgaaagacgaa

SEQ ID NO: 19089 - DNA, 25 bp, Gossypium hirsutum
gcgtgcttttctgtctatcctagtt

SEQ ID NO: 19090 - DNA, 17 bp, Gossypium hirsutum
tttggtattgatttttg

SEQ ID NO: 19091 - DNA, 18 bp, Gossypium hirsutum
ctttggtatttatttttg

SEQ ID NO: 19092 - DNA, 32 bp, Gossypium hirsutum
acaaataggttttcctgaaagtttatgcattt

SEQ ID NO: 19093 - DNA, 31 bp, Gossypium hirsutum
cttggttaactactgcgaattatttaatggt

SEQ ID NO: 19094 - DNA, 15 bp, Gossypium hirsutum
cttcccgcatcgcat

SEQ ID NO: 19095 - DNA, 16 bp, Gossypium hirsutum
ccttcccgtatcgcat

SEQ ID NO: 19096 - DNA, 16 bp, Gossypium hirsutum
cgagcggcccctctag

SEQ ID NO: 19097 - DNA, 23 bp, Gossypium hirsutum
tgcacaatcaacaagctgagcta

SEQ ID NO: 19098 - DNA, 18 bp, Gossypium hirsutum
tttccctacaagttccct

SEQ ID NO: 19099 - DNA, 16 bp, Gossypium hirsutum
tccctacaaattccct

SEQ ID NO: 19100 - DNA, 25 bp, Gossypium hirsutum
gcatgtagtagcaagagctcctttt

SEQ ID NO: 19101 - DNA, 15 bp, Gossypium hirsutum
gcgccccctcttcct

SEQ ID NO: 19102 - DNA, 19 bp, Gossypium hirsutum
aaatatgggtttggcttat

SEQ ID NO: 19103 - DNA, 19 bp, Gossypium hirsutum
aaatatgggttaggcttat

SEQ ID NO: 19104 - DNA, 26 bp, Gossypium hirsutum
ctgaaaacactagcatgaacagttgt

SEQ ID NO: 19105 - DNA, 24 bp, Gossypium hirsutum
ccatggaagtatggttggcatcat

SEQ ID NO: 19106 - DNA, 20 bp, Gossypium hirsutum
caaatgttatgactgaaaac

SEQ ID NO: 19107 - DNA, 20 bp, Gossypium hirsutum
caaatgttatgattgaaaac

SEQ ID NO: 19108 - DNA, 42 bp, Gossypium hirsutum
agaaaatttggtatgaagtacactaactttaaatactagaaa

SEQ ID NO: 19109 - DNA, 42 bp, Gossypium hirsutum
aattgttctagtgcatatttgttgagttatttcatatttaat

SEQ ID NO: 19110 - DNA, 23 bp, Gossypium hirsutum
ataaactcgatcaaatactaaaa

SEQ ID NO: 19111 - DNA, 18 bp, Gossypium hirsutum
ctcgatcaaagactaaaa

SEQ ID NO: 19112 - DNA, 49 bp, Gossypium hirsutum
agtatataaaaggaagttttaataaccttaatgatgtaaaatcaaattc

SEQ ID NO: 19113 - DNA, 29 bp, Gossypium hirsutum
cacaattaaaacaagcaccaagaatcaag

SEQ ID NO: 19114 - DNA, 19 bp, Gossypium hirsutum
cttccacatcatatcccct

SEQ ID NO: 19115 - DNA, 19 bp, Gossypium hirsutum
cttccacatcatctcccct

SEQ ID NO: 19116 - DNA, 34 bp, Gossypium hirsutum
gtcatctatataaataccagagatcaaatctgca

SEQ ID NO: 19117 - DNA, 25 bp, Gossypium hirsutum
gctcttagtaggcattcccttgttt

SEQ ID NO: 19118 - DNA, 16 bp, Gossypium hirsutum
aagagcacataaaaat

SEQ ID NO: 19119 - DNA, 15 bp, Gossypium hirsutum
aagagcacataaaat

SEQ ID NO: 19120 - DNA, 23 bp, Gossypium hirsutum
cttacacatgcattgccaaaagc

SEQ ID NO: 19121 - DNA, 27 bp, Gossypium hirsutum
gggatatatcaaccaagcattcaccat

SEQ ID NO: 19122 - DNA, 14 bp, Gossypium hirsutum
cagccgtaaataca

SEQ ID NO: 19123 - DNA, 14 bp, Gossypium hirsutum
cagccgtcaataca

SEQ ID NO: 19124 - DNA, 27 bp, Gossypium hirsutum
ggaacatttagacggattaacttccct

SEQ ID NO: 19125 - DNA, 22 bp, Gossypium hirsutum
ttgggataggctcgtgtcaaaa

SEQ ID NO: 19126 - DNA, 17 bp, Gossypium hirsutum
cctaaacaggtcaagcc

SEQ ID NO: 19127 - DNA, 17 bp, Gossypium hirsutum
cctaaacagatcaagcc

SEQ ID NO: 19128 - DNA, 26 bp, Gossypium hirsutum
caaaaagagagagggtttggacaaaa

SEQ ID NO: 19129 - DNA, 23 bp, Gossypium hirsutum
ctaaggcgttgaacactcttgac

SEQ ID NO: 19130 - DNA, 16 bp, Gossypium hirsutum
catcatatgaaattcg

SEQ ID NO: 19131 - DNA, 18 bp, Gossypium hirsutum
atcatcatatgacattcg

SEQ ID NO: 19132 - DNA, 43 bp, Gossypium hirsutum
cgtaatttcaatttcaaatcttaaaatacaacaatttcactat

SEQ ID NO: 19133 - DNA, 24 bp, Gossypium hirsutum
agcttctgttaccaccactactga

SEQ ID NO: 19134 - DNA, 16 bp, Gossypium hirsutum
ccatcatcaaaagtca

SEQ ID NO: 19135 - DNA, 17 bp, Gossypium hirsutum
accatcatcataagtca

SEQ ID NO: 19136 - DNA, 19 bp, Gossypium hirsutum
gtcacctgcacgagacctt

SEQ ID NO: 19137 - DNA, 38 bp, Gossypium hirsutum
ctataatattctgtataattgtctttacctggtaacca

SEQ ID NO: 19138 - DNA, 17 bp, Gossypium hirsutum
ccaatgaccaagagttg

SEQ ID NO: 19139 - DNA, 16 bp, Gossypium hirsutum
caatgaccaggagttg

SEQ ID NO: 19140 - DNA, 23 bp, Gossypium hirsutum
gcacatttcatccagggtactca

SEQ ID NO: 19141 - DNA, 22 bp, Gossypium hirsutum
aaacagcaggcagaaacaacag

SEQ ID NO: 19142 - DNA, 18 bp, Gossypium hirsutum
tgctctctgttcttttta

SEQ ID NO: 19143 - DNA, 17 bp, Gossypium hirsutum
tgctctctgttttttta

SEQ ID NO: 19144 - DNA, 21 bp, Gossypium hirsutum
aggtgccagcaggtatgaatg

SEQ ID NO: 19145 - DNA, 26 bp, Gossypium hirsutum
gcctgattattttgttaaccgtgaca

SEQ ID NO: 19146 - DNA, 20 bp, Gossypium hirsutum
cgtgtatctcatgttggcat

SEQ ID NO: 19147 - DNA, 20 bp, Gossypium hirsutum
cgtgtatctcatattggcat

SEQ ID NO: 19148 - DNA, 25 bp, Gossypium hirsutum
aactggacagtgacatatggtatgc

SEQ ID NO: 19149 - DNA, 27 bp, Gossypium hirsutum
tggtgcttattagcatctcataatgca

SEQ ID NO: 19150 - DNA, 22 bp, Gossypium hirsutum
tcctacttttttttcgtgaagc

SEQ ID NO: 19151 - DNA, 20 bp, Gossypium hirsutum
cctactttttttcgtgaagc

SEQ ID NO: 19152 - DNA, 25 bp, Gossypium hirsutum
cgggctttcgtgttaaccaagatat

SEQ ID NO: 19153 - DNA, 27 bp, Gossypium hirsutum
gagtcttagatgacttatcctcctcct

SEQ ID NO: 19154 - DNA, 17 bp, Gossypium hirsutum
ccaccagacctattaag

SEQ ID NO: 19155 - DNA, 17 bp, Gossypium hirsutum
ccaccaaacctattaag

SEQ ID NO: 19156 - DNA, 38 bp, Gossypium hirsutum
tctcttttttctcataatttctctcactactttagttt

SEQ ID NO: 19157 - DNA, 34 bp, Gossypium hirsutum
ttcaagtcttgattgagctaaattttttattggt

SEQ ID NO: 19158 - DNA, 18 bp, Gossypium hirsutum
tgatcaaaacttaaattt

SEQ ID NO: 19159 - DNA, 16 bp, Gossypium hirsutum
atcaaaactgaaattt

SEQ ID NO: 19160 - DNA, 33 bp, Gossypium hirsutum
agaagatcatacagtaacgattttaacagttca

SEQ ID NO: 19161 - DNA, 29 bp, Gossypium hirsutum
gttgaaccaaatctttgtgagaattcaga

SEQ ID NO: 19162 - DNA, 17 bp, Gossypium hirsutum
acaacacctctgctcat

SEQ ID NO: 19163 - DNA, 16 bp, Gossypium hirsutum
caacacctgtgctcat

SEQ ID NO: 19164 - DNA, 20 bp, Gossypium hirsutum
tgaatgcccgtccatttgga

SEQ ID NO: 19165 - DNA, 32 bp, Gossypium hirsutum
tcaaagctgatctatagttctatactgcatga

SEQ ID NO: 19166 - DNA, 17 bp, Gossypium hirsutum
tcaaaacccaaagaatt

SEQ ID NO: 19167 - DNA, 15 bp, Gossypium hirsutum
aaaacccgaagaatt

SEQ ID NO: 19168 - DNA, 25 bp, Gossypium hirsutum
gagaagagatgcagaacgtagagaa

SEQ ID NO: 19169 - DNA, 34 bp, Gossypium hirsutum
tggtattagtccatatactttaagaaagttgtgg

SEQ ID NO: 19170 - DNA, 15 bp, Gossypium hirsutum
ccaacagggaaatag

SEQ ID NO: 19171 - DNA, 15 bp, Gossypium hirsutum
ccaacagagaaatag

SEQ ID NO: 19172 - DNA, 41 bp, Gossypium hirsutum
atcttttgattaattacacacattcatttatagttattgca

SEQ ID NO: 19173 - DNA, 35 bp, Gossypium hirsutum
aggtatgctttacttgcaattaacaatgattttat

SEQ ID NO: 19174 - DNA, 26 bp, Gossypium hirsutum
caatcattttagaatacaatatatat

SEQ ID NO: 19175 - DNA, 23 bp, Gossypium hirsutum
tcattttagaatacaataaatat

SEQ ID NO: 19176 - DNA, 22 bp, Gossypium hirsutum
ggatccctctcagcctattgtg

SEQ ID NO: 19177 - DNA, 19 bp, Gossypium hirsutum
tcgagacccagacccgtat

SEQ ID NO: 19178 - DNA, 21 bp, Gossypium hirsutum
ataatttagctcacgttaagg

SEQ ID NO: 19179 - DNA, 18 bp, Gossypium hirsutum
atttagctcacattaagg

SEQ ID NO: 19180 - DNA, 25 bp, Gossypium hirsutum
cacaggacaacatatgcagttatgc

SEQ ID NO: 19181 - DNA, 27 bp, Gossypium hirsutum
aaaaagaggcagtttatgaagcattgg

SEQ ID NO: 19182 - DNA, 17 bp, Gossypium hirsutum
ccaagctacccttttgt

SEQ ID NO: 19183 - DNA, 16 bp, Gossypium hirsutum
caagctacccatttgt

SEQ ID NO: 19184 - DNA, 23 bp, Gossypium hirsutum
gctgcaatcaatggaaactcagt

SEQ ID NO: 19185 - DNA, 42 bp, Gossypium hirsutum
tagaaaacaataaactaattataaattttggatgatgttgga

SEQ ID NO: 19186 - DNA, 18 bp, Gossypium hirsutum
atcaaaccgaaactaaat

SEQ ID NO: 19187 - DNA, 18 bp, Gossypium hirsutum
atcaaaccgaatctaaat

SEQ ID NO: 19188 - DNA, 25 bp, Gossypium hirsutum
gccataacactgaactgtagcattc

SEQ ID NO: 19189 - DNA, 32 bp, Gossypium hirsutum
ccaagatgatctatgaagtttatacaactgca

SEQ ID NO: 19190 - DNA, 17 bp, Gossypium hirsutum
atggtagaagctttttt

SEQ ID NO: 19191 - DNA, 16 bp, Gossypium hirsutum
tggtagaagccttttt

SEQ ID NO: 19192 - DNA, 27 bp, Gossypium hirsutum
ggaagtactaagttcgtttgcattctg

SEQ ID NO: 19193 - DNA, 33 bp, Gossypium hirsutum
tttttaactgatttttgtaacagattagccagg

SEQ ID NO: 19194 - DNA, 17 bp, Gossypium hirsutum
cattagctcgctacttc

SEQ ID NO: 19195 - DNA, 18 bp, Gossypium hirsutum
acattagctcactacttc

SEQ ID NO: 19196 - DNA, 44 bp, Gossypium hirsutum
agtctaacaattcacttactaatctatttcaaaataaaacaaag

SEQ ID NO: 19197 - DNA, 24 bp, Gossypium hirsutum
cccatttctgttttccttgttgca

SEQ ID NO: 19198 - DNA, 18 bp, Gossypium hirsutum
tcatgcagtagtttcgag

SEQ ID NO: 19199 - DNA, 16 bp, Gossypium hirsutum
atgcagtagcttcgag

SEQ ID NO: 19200 - DNA, 15 bp, Gossypium hirsutum
tcgaggccccgagct

SEQ ID NO: 19201 - DNA, 25 bp, Gossypium hirsutum
gagagaacgaagagctgctcaatta

SEQ ID NO: 19202 - DNA, 15 bp, Gossypium hirsutum
cgacatcgaatcgtt

SEQ ID NO: 19203 - DNA, 15 bp, Gossypium hirsutum
cgacatcaaatcgtt

SEQ ID NO: 19204 - DNA, 25 bp, Gossypium hirsutum
tgtcaagctcttaaaagcgtcttct

SEQ ID NO: 19205 - DNA, 26 bp, Gossypium hirsutum
gtgacagaatacacagatccaatggt

SEQ ID NO: 19206 - DNA, 20 bp, Gossypium hirsutum
cttcaacataccctgattgt

SEQ ID NO: 19207 - DNA, 16 bp, Gossypium hirsutum
aacatacccagattgt

SEQ ID NO: 19208 - DNA, 40 bp, Gossypium hirsutum
cgataattgtaaaagattaagtaatccctaagttcttcat

SEQ ID NO: 19209 - DNA, 26 bp, Gossypium hirsutum
agcgataatgtttgagggtaaaggtt

SEQ ID NO: 19210 - DNA, 19 bp, Gossypium hirsutum
atatagtcaaaattttccc

SEQ ID NO: 19211 - DNA, 21 bp, Gossypium hirsutum
atatatagtcaaatttttccc

SEQ ID NO: 19212 - DNA, 26 bp, Gossypium hirsutum
ctgacaggtctaccttatttgcatgt

SEQ ID NO: 19213 - DNA, 28 bp, Gossypium hirsutum
cagatcttatggcagagatttagagagg

SEQ ID NO: 19214 - DNA, 22 bp, Gossypium hirsutum
caatattttaaaagaagaattt

SEQ ID NO: 19215 - DNA, 22 bp, Gossypium hirsutum
caatattttaaaagaaggattt

SEQ ID NO: 19216 - DNA, 20 bp, Gossypium hirsutum
ggcgggcggtttcttaaatt

SEQ ID NO: 19217 - DNA, 23 bp, Gossypium hirsutum
ggcttcaactccacatgattagc

SEQ ID NO: 19218 - DNA, 16 bp, Gossypium hirsutum
atgaaaatggaaaagc

SEQ ID NO: 19219 - DNA, 16 bp, Gossypium hirsutum
atgaaaatgaaaaagc

SEQ ID NO: 19220 - DNA, 24 bp, Gossypium hirsutum
acgtggcaaactgaattcaagaag

SEQ ID NO: 19221 - DNA, 26 bp, Gossypium hirsutum
ggagttgaagtcccaatctgattttg

SEQ ID NO: 19222 - DNA, 17 bp, Gossypium hirsutum
cttgcaatgcctcttat

SEQ ID NO: 19223 - DNA, 16 bp, Gossypium hirsutum
ttgcaatgccccttat

SEQ ID NO: 19224 - DNA, 39 bp, Gossypium hirsutum
cctatgtatccctattcttctttttattttgtaggaatt

SEQ ID NO: 19225 - DNA, 24 bp, Gossypium hirsutum
ttcaacttccatgtccacatccat

SEQ ID NO: 19226 - DNA, 19 bp, Gossypium hirsutum
atcatcttctccagcatgg

SEQ ID NO: 19227 - DNA, 17 bp, Gossypium hirsutum
catcttctccggcatgg

SEQ ID NO: 19228 - DNA, 24 bp, Gossypium hirsutum
gatggtgatacgctttctggagaa

SEQ ID NO: 19229 - DNA, 25 bp, Gossypium hirsutum
gctaataaaagcacgcagtgtcatt

SEQ ID NO: 19230 - DNA, 18 bp, Gossypium hirsutum
cttggatcaaaattattt

SEQ ID NO: 19231 - DNA, 17 bp, Gossypium hirsutum
cttggatcaaattattt

SEQ ID NO: 19232 - DNA, 25 bp, Gossypium hirsutum
aggccaaaatcctattcaacacagt

SEQ ID NO: 19233 - DNA, 24 bp, Gossypium hirsutum
gaaagtgctgatggtgcatgaatc

SEQ ID NO: 19234 - DNA, 22 bp, Gossypium hirsutum
acatacttagtcatatcttttt

SEQ ID NO: 19235 - DNA, 20 bp, Gossypium hirsutum
catacttagtcatatttttt

SEQ ID NO: 19236 - DNA, 25 bp, Gossypium hirsutum
gagaggaggtgtgctttactgttaa

SEQ ID NO: 19237 - DNA, 35 bp, Gossypium hirsutum
catgtttttggtctattttacgaatttatgattcc

SEQ ID NO: 19238 - DNA, 20 bp, Gossypium hirsutum
aaaagggaatatgattttta

SEQ ID NO: 19239 - DNA, 20 bp, Gossypium hirsutum
aaaagggaatatgtttttta

SEQ ID NO: 19240 - DNA, 21 bp, Gossypium hirsutum
tcaaaacccgccctttaacca

SEQ ID NO: 19241 - DNA, 25 bp, Gossypium hirsutum
gtttccaatatgcccaatcaaccat

SEQ ID NO: 19242 - DNA, 19 bp, Gossypium hirsutum
ctgtatgatataggcaagc

SEQ ID NO: 19243 - DNA, 19 bp, Gossypium hirsutum
ctgtatgatataagcaagc

SEQ ID NO: 19244 - DNA, 30 bp, Gossypium hirsutum
gcccatccttttaagagattttcaatatcc

SEQ ID NO: 19245 - DNA, 32 bp, Gossypium hirsutum
gatgaggaaatataagaaggtttgagaaatcg

SEQ ID NO: 19246 - DNA, 16 bp, Gossypium hirsutum
cacaatgagcaacctg

SEQ ID NO: 19247 - DNA, 14 bp, Gossypium hirsutum
caatgggcaacctg

SEQ ID NO: 19248 - DNA, 32 bp, Gossypium hirsutum
tgcattacaggaattatatcaaagaccatctc

SEQ ID NO: 19249 - DNA, 23 bp, Gossypium hirsutum
tgcacacagtctgattcagcaat

SEQ ID NO: 19250 - DNA, 22 bp, Gossypium hirsutum
ctccttaaatcttatgtattgc

SEQ ID NO: 19251 - DNA, 21 bp, Gossypium hirsutum
tccttaaatcttaagtattgc

SEQ ID NO: 19252 - DNA, 29 bp, Gossypium hirsutum
gcaaatcttccttccaagcattttgaaat

SEQ ID NO: 19253 - DNA, 34 bp, Gossypium hirsutum
acttataacttttcatttgcaacaatcagaacat

SEQ ID NO: 19254 - DNA, 20 bp, Gossypium hirsutum
tctactctcaaaaatattct

SEQ ID NO: 19255 - DNA, 18 bp, Gossypium hirsutum
ctactctcaaaatattct

SEQ ID NO: 19256 - DNA, 28 bp, Gossypium hirsutum
cgtaagacgctttcatttatgcaattga

SEQ ID NO: 19257 - DNA, 23 bp, Gossypium hirsutum
gagcttttggctaagtgcagatg

SEQ ID NO: 19258 - DNA, 17 bp, Gossypium hirsutum
ctcttcctgataatatc

SEQ ID NO: 19259 - DNA, 15 bp, Gossypium hirsutum
cttcctgacaatatc

SEQ ID NO: 19260 - DNA, 28 bp, Gossypium hirsutum
ccttcttccatataggtcccttttcatt

SEQ ID NO: 19261 - DNA, 25 bp, Gossypium hirsutum
tcagaaaatgaaggaagtcgaagca

SEQ ID NO: 19262 - DNA, 17 bp, Gossypium hirsutum
ctacctcacgttcaatt

SEQ ID NO: 19263 - DNA, 17 bp, Gossypium hirsutum
ctacctcaccttcaatt

SEQ ID NO: 19264 - DNA, 24 bp, Gossypium hirsutum
caagttgcacatcttcacgaatgg

SEQ ID NO: 19265 - DNA, 28 bp, Gossypium hirsutum
gtcgttcatgatgaatccataaaatgct

SEQ ID NO: 19266 - DNA, 20 bp, Gossypium hirsutum
aatttaaacacacattccac

SEQ ID NO: 19267 - DNA, 20 bp, Gossypium hirsutum
aatttaaacacactttccac

SEQ ID NO: 19268 - DNA, 40 bp, Gossypium hirsutum
tgagattagaagtaatggattggatactatattaatgaga

SEQ ID NO: 19269 - DNA, 27 bp, Gossypium hirsutum
agattgaaatgtcttcaggatgggaag

SEQ ID NO: 19270 - DNA, 18 bp, Gossypium hirsutum
ttatgttgacaaatgttg

SEQ ID NO: 19271 - DNA, 16 bp, Gossypium hirsutum
atgttgacagatgttg

SEQ ID NO: 19272 - DNA, 22 bp, Gossypium hirsutum
acggaactggatgtagggtcat

SEQ ID NO: 19273 - DNA, 46 bp, Gossypium hirsutum
gttgaaaaactcagttaatgattaatttataataatgagtatacgt

SEQ ID NO: 19274 - DNA, 20 bp, Gossypium hirsutum
tgcttaaaagtaattttatc

SEQ ID NO: 19275 - DNA, 18 bp, Gossypium hirsutum
cttaaaagcaattttatc

SEQ ID NO: 19276 - DNA, 46 bp, Gossypium hirsutum
catttgtattgatttaaacattgaggatgtatcattatattatagg

SEQ ID NO: 19277 - DNA, 34 bp, Gossypium hirsutum
ggatttggaaattttgataagataagcatcaact

SEQ ID NO: 19278 - DNA, 17 bp, Gossypium hirsutum
acagcttgctagatagt

SEQ ID NO: 19279 - DNA, 15 bp, Gossypium hirsutum
agcttgctagattgt

SEQ ID NO: 19280 - DNA, 22 bp, Gossypium hirsutum
gagcatactcctggcagaatga

SEQ ID NO: 19281 - DNA, 25 bp, Gossypium hirsutum
tgctcaacaaatctcctttgatggt

SEQ ID NO: 19282 - DNA, 16 bp, Gossypium hirsutum
tccgaatgatgacttc

SEQ ID NO: 19283 - DNA, 15 bp, Gossypium hirsutum
ccgaatgataacttc

SEQ ID NO: 19284 - DNA, 19 bp, Gossypium hirsutum
gctttgttggcagcaccaa

SEQ ID NO: 19285 - DNA, 23 bp, Gossypium hirsutum
cgtgagcgctgacattatttcct

SEQ ID NO: 19286 - DNA, 18 bp, Gossypium hirsutum
tgacaaatgagaagctta

SEQ ID NO: 19287 - DNA, 19 bp, Gossypium hirsutum
ctgacaaatgagtagctta

SEQ ID NO: 19288 - DNA, 26 bp, Gossypium hirsutum
caagacagcagactaaagaaaaagct

SEQ ID NO: 19289 - DNA, 25 bp, Gossypium hirsutum
gcatcttgagcaaaattcactgact

SEQ ID NO: 19290 - DNA, 19 bp, Gossypium hirsutum
cttatttcccctggtatca

SEQ ID NO: 19291 - DNA, 18 bp, Gossypium hirsutum
ttatttcccccggtatca

SEQ ID NO: 19292 - DNA, 23 bp, Gossypium hirsutum
caagtccaccagcctaaaacagt

SEQ ID NO: 19293 - DNA, 43 bp, Gossypium hirsutum
tgaaataatcggtttatatagtagaactatacattttgctatc

SEQ ID NO: 19294 - DNA, 21 bp, Gossypium hirsutum
ccttcaaaagtattgtttgca

SEQ ID NO: 19295 - DNA, 21 bp, Gossypium hirsutum
ccttcaaaagtattttttgca

SEQ ID NO: 19296 - DNA, 31 bp, Gossypium hirsutum
ctttcagaagcaaaacaataaaattgcatgt

SEQ ID NO: 19297 - DNA, 33 bp, Gossypium hirsutum
agcaaaagattaaacgatgtgatttgtgataaa

SEQ ID NO: 19298 - DNA, 21 bp, Gossypium hirsutum
cttctcaaaagtaggtagaat

SEQ ID NO: 19299 - DNA, 21 bp, Gossypium hirsutum
cttctcaaaagtaagtagaat

SEQ ID NO: 19300 - DNA, 23 bp, Gossypium hirsutum
gtgaccgttttacaagtgcaact

SEQ ID NO: 19301 - DNA, 24 bp, Gossypium hirsutum
aactctgacctgaactcatttccc

SEQ ID NO: 19302 - DNA, 18 bp, Gossypium hirsutum
tcgaatgttgggtcacat

SEQ ID NO: 19303 - DNA, 18 bp, Gossypium hirsutum
tcgaatgttggatcacat

SEQ ID NO: 19304 - DNA, 31 bp, Gossypium hirsutum
agaaaaccatttgtttgactatatggagcta

SEQ ID NO: 19305 - DNA, 39 bp, Gossypium hirsutum
ccctgaatgaggtattaaaactttaaaagtataaaatgt

SEQ ID NO: 19306 - DNA, 17 bp, Gossypium hirsutum
ttagcattttcaaaatc

SEQ ID NO: 19307 - DNA, 17 bp, Gossypium hirsutum
ttagcattttaaaaatc

SEQ ID NO: 19308 - DNA, 30 bp, Gossypium hirsutum
aggttgtagaactaaacttttcaccttcat

SEQ ID NO: 19309 - DNA, 28 bp, Gossypium hirsutum
tggtctgcatgattatatttgtcgagtt

SEQ ID NO: 19310 - DNA, 19 bp, Gossypium hirsutum
cattcaaatgcactccaca

SEQ ID NO: 19311 - DNA, 18 bp, Gossypium hirsutum
attcaaatgcagtccaca

SEQ ID NO: 19312 - DNA, 30 bp, Gossypium hirsutum
gaccagttcaaattgaataatgctaacaca

SEQ ID NO: 19313 - DNA, 35 bp, Gossypium hirsutum
catgggattgtcactgtaacttacatattttattt

SEQ ID NO: 19314 - DNA, 22 bp, Gossypium hirsutum
ctacaatttttttttgaaaaca

SEQ ID NO: 19315 - DNA, 22 bp, Gossypium hirsutum
ctacaatttttttttaaaaaca

SEQ ID NO: 19316 - DNA, 27 bp, Gossypium hirsutum
tttcactcaattcaatcgaacgttcac

SEQ ID NO: 19317 - DNA, 35 bp, Gossypium hirsutum
tcaagcatcaaaatgatataaaaatgcaaaaaaca

SEQ ID NO: 19318 - DNA, 20 bp, Gossypium hirsutum
ttttgactttctagttcttc

SEQ ID NO: 19319 - DNA, 18 bp, Gossypium hirsutum
ttgactttctagctcttc

SEQ ID NO: 19320 - DNA, 29 bp, Gossypium hirsutum
cttggtagaaggctcttagatatcctaga

SEQ ID NO: 19321 - DNA, 25 bp, Gossypium hirsutum
gcccaaacattttcatttcaaccaa

SEQ ID NO: 19322 - DNA, 18 bp, Gossypium hirsutum
ctaaacatgaccattctt

SEQ ID NO: 19323 - DNA, 18 bp, Gossypium hirsutum
ctaaacatgactattctt

SEQ ID NO: 19324 - DNA, 29 bp, Gossypium hirsutum
ttccaattttcagtcgtttaattgcttga

SEQ ID NO: 19325 - DNA, 32 bp, Gossypium hirsutum
cgaatcagtttgtttgtacagtgataaaagat

SEQ ID NO: 19326 - DNA, 23 bp, Gossypium hirsutum
acaacaatattgaaactagacac

SEQ ID NO: 19327 - DNA, 22 bp, Gossypium hirsutum
caacaatattgaaaatagacac

SEQ ID NO: 19328 - DNA, 29 bp, Gossypium hirsutum
cccctaatttcttagcaacattctcactt

SEQ ID NO: 19329 - DNA, 24 bp, Gossypium hirsutum
aaggcatagctttgtggaggaatt

SEQ ID NO: 19330 - DNA, 20 bp, Gossypium hirsutum
aattaccacaggtttagaag

SEQ ID NO: 19331 - DNA, 23 bp, Gossypium hirsutum
ataaattaccacaagtttagaag

SEQ ID NO: 19332 - DNA, 38 bp, Gossypium hirsutum
aaaaaaaatcttgcagtccattttagttagatttagat

SEQ ID NO: 19333 - DNA, 34 bp, Gossypium hirsutum
ttatcaattttattcaatacaatccaatctcgcc

SEQ ID NO: 19334 - DNA, 16 bp, Gossypium hirsutum
acgtccctttcgctgc

SEQ ID NO: 19335 - DNA, 15 bp, Gossypium hirsutum
cgtccctttctctgc

SEQ ID NO: 19336 - DNA, 30 bp, Gossypium hirsutum
tttgagagtgtttaaaccttacttcaggaa

SEQ ID NO: 19337 - DNA, 23 bp, Gossypium hirsutum
ggctgagagaactgagttggaaa

SEQ ID NO: 19338 - DNA, 20 bp, Gossypium hirsutum
atagagttcctttgaaccag

SEQ ID NO: 19339 - DNA, 19 bp, Gossypium hirsutum
atagagttccttgaaccag

SEQ ID NO: 19340 - DNA, 30 bp, Gossypium hirsutum
ctcttattaaagatttaagcaaaccggctc

SEQ ID NO: 19341 - DNA, 24 bp, Gossypium hirsutum
acattgttaacggctcgacatgaa

SEQ ID NO: 19342 - DNA, 19 bp, Gossypium hirsutum
ccctgtactttttctttca

SEQ ID NO: 19343 - DNA, 18 bp, Gossypium hirsutum
cctgtacttttcctttca

SEQ ID NO: 19344 - DNA, 26 bp, Gossypium hirsutum
tgccatcaatccatgtacttttctca

SEQ ID NO: 19345 - DNA, 24 bp, Gossypium hirsutum
gcaacggcgtaaaagttttcattt

SEQ ID NO: 19346 - DNA, 15 bp, Gossypium hirsutum
tcgagtccgggcgaa

SEQ ID NO: 19347 - DNA, 16 bp, Gossypium hirsutum
ttcgagtccgcgcgaa

SEQ ID NO: 19348 - DNA, 25 bp, Gossypium hirsutum
cgtgagtctaacacactgaatgtct

SEQ ID NO: 19349 - DNA, 24 bp, Gossypium hirsutum
gctgttcaatgcacaatcctatga

SEQ ID NO: 19350 - DNA, 21 bp, Gossypium hirsutum
cagataacacgattgtgtgag

SEQ ID NO: 19351 - DNA, 21 bp, Gossypium hirsutum
cagataacacgattatgtgag

SEQ ID NO: 19352 - DNA, 22 bp, Gossypium hirsutum
gggctacaccttttcacatggt

SEQ ID NO: 19353 - DNA, 26 bp, Gossypium hirsutum
cgctcactctatcgtatgctttactc

SEQ ID NO: 19354 - DNA, 22 bp, Gossypium hirsutum
tcataaaacctttttgccctac

SEQ ID NO: 19355 - DNA, 20 bp, Gossypium hirsutum
cataaaaccttttgccctac

SEQ ID NO: 19356 - DNA, 27 bp, Gossypium hirsutum
cttcttgcttacgaaattcttcacaca

SEQ ID NO: 19357 - DNA, 42 bp, Gossypium hirsutum
tcctttctgaaaatgataatattaagaaacttctatcagaat

SEQ ID NO: 19358 - DNA, 23 bp, Gossypium hirsutum
cacatttatttttgtaagactat

SEQ ID NO: 19359 - DNA, 22 bp, Gossypium hirsutum
acatttatttttgttagactat

SEQ ID NO: 19360 - DNA, 42 bp, Gossypium hirsutum
ggagttcttaaataaataaaagtggttcataaattccataaa

SEQ ID NO: 19361 - DNA, 25 bp, Gossypium hirsutum
cggagttcatcgttaggttggtatg

SEQ ID NO: 19362 - DNA, 19 bp, Gossypium hirsutum
tgcaattttcaatagtttg

SEQ ID NO: 19363 - DNA, 19 bp, Gossypium hirsutum
tgcaattttcagtagtttg

SEQ ID NO: 19364 - DNA, 33 bp, Gossypium hirsutum
acttgaagaattcataaacaaactagagatgca

SEQ ID NO: 19365 - DNA, 31 bp, Gossypium hirsutum
ctactttgtattctctgaaggagcctatttt

SEQ ID NO: 19366 - DNA, 17 bp, Gossypium hirsutum
cactgactagtgattac

SEQ ID NO: 19367 - DNA, 16 bp, Gossypium hirsutum
actgactggtgattac

SEQ ID NO: 19368 - DNA, 26 bp, Gossypium hirsutum
aagtcacaaattagcatttggcatga

SEQ ID NO: 19369 - DNA, 28 bp, Gossypium hirsutum
gctgtcacaagtctatattttgctgaga

SEQ ID NO: 19370 - DNA, 19 bp, Gossypium hirsutum
aaatacatgacaggtaatg

SEQ ID NO: 19371 - DNA, 19 bp, Gossypium hirsutum
caaatacatgacagtaatg

SEQ ID NO: 19372 - DNA, 20 bp, Gossypium hirsutum
tgaacccaggcaaagctgtt

SEQ ID NO: 19373 - DNA, 27 bp, Gossypium hirsutum
tttttcaccattcatccctctttctca

SEQ ID NO: 19374 - DNA, 22 bp, Gossypium hirsutum
cttgctatataatgattaagac

SEQ ID NO: 19375 - DNA, 21 bp, Gossypium hirsutum
ttgctatataatggttaagac

SEQ ID NO: 19376 - DNA, 24 bp, Gossypium hirsutum
gtgatcacacaacagtccagaagt

SEQ ID NO: 19377 - DNA, 23 bp, Gossypium hirsutum
tcttcgactcgcctttcaatctc

SEQ ID NO: 19378 - DNA, 17 bp, Gossypium hirsutum
ccatttccttaatctct

SEQ ID NO: 19379 - DNA, 17 bp, Gossypium hirsutum
ccatttccttgatctct

SEQ ID NO: 19380 - DNA, 25 bp, Gossypium hirsutum
gcttggtgaattggagacattgatg

SEQ ID NO: 19381 - DNA, 37 bp, Gossypium hirsutum
gtaaatcagggattttttgaaatgtttagaaactaga

SEQ ID NO: 19382 - DNA, 21 bp, Gossypium hirsutum
tctgttgcaaaattctgaatt

SEQ ID NO: 19383 - DNA, 19 bp, Gossypium hirsutum
tgttgcaaaattctaaatt

SEQ ID NO: 19384 - DNA, 27 bp, Gossypium hirsutum
gaaatttaccgagtctaaggctaaggt

SEQ ID NO: 19385 - DNA, 26 bp, Gossypium hirsutum
gcaagaaagtggaagaaattgtctgt

SEQ ID NO: 19386 - DNA, 17 bp, Gossypium hirsutum
agtgatgaagtaattct

SEQ ID NO: 19387 - DNA, 15 bp, Gossypium hirsutum
tgatgaagaaattct

SEQ ID NO: 19388 - DNA, 32 bp, Gossypium hirsutum
tgatcaattgtgtaaataacaaaatgcccatt

SEQ ID NO: 19389 - DNA, 25 bp, Gossypium hirsutum
ctgcattagcatttacatggcacaa

SEQ ID NO: 19390 - DNA, 21 bp, Gossypium hirsutum
ataaataaggctccatagatg

SEQ ID NO: 19391 - DNA, 21 bp, Gossypium hirsutum
ataaataaggctccctagatg

SEQ ID NO: 19392 - DNA, 27 bp, Gossypium hirsutum
gacttggtcttatatggcattccacat

SEQ ID NO: 19393 - DNA, 24 bp, Gossypium hirsutum
aagtgtgtcgagaggaaacatagc

SEQ ID NO: 19394 - DNA, 16 bp, Gossypium hirsutum
ccatagccggcaccgt

SEQ ID NO: 19395 - DNA, 16 bp, Gossypium hirsutum
ccatagccagcaccgt

SEQ ID NO: 19396 - DNA, 25 bp, Gossypium hirsutum
gccttcacttttggcaattcatgat

SEQ ID NO: 19397 - DNA, 25 bp, Gossypium hirsutum
ccctcctccattatttccactcatc

SEQ ID NO: 19398 - DNA, 17 bp, Gossypium hirsutum
tccctctcttactctct

SEQ ID NO: 19399 - DNA, 17 bp, Gossypium hirsutum
tccctctctttctctct

SEQ ID NO: 19400 - DNA, 28 bp, Gossypium hirsutum
caacacccagttttctacttgtaaaagg

SEQ ID NO: 19401 - DNA, 24 bp, Gossypium hirsutum
acatccaaggacccaaatttccat

SEQ ID NO: 19402 - DNA, 14 bp, Gossypium hirsutum
cggcttcgaataca

SEQ ID NO: 19403 - DNA, 14 bp, Gossypium hirsutum
cggcttcaaataca

SEQ ID NO: 19404 - DNA, 24 bp, Gossypium hirsutum
agggaaggagaatagatgcaaggt

SEQ ID NO: 19405 - DNA, 24 bp, Gossypium hirsutum
ctgtctgatccggctgttttagat

SEQ ID NO: 19406 - DNA, 16 bp, Gossypium hirsutum
aaagacatgcagctgc

SEQ ID NO: 19407 - DNA, 18 bp, Gossypium hirsutum
tcaaagacattcagctgc

SEQ ID NO: 19408 - DNA, 29 bp, Gossypium hirsutum
gccgaagaacagattagaataaacatggt

SEQ ID NO: 19409 - DNA, 25 bp, Gossypium hirsutum
acttgaatgggaaccttgctttagt

SEQ ID NO: 19410 - DNA, 21 bp, Gossypium hirsutum
atactccttttcctcattaag

SEQ ID NO: 19411 - DNA, 17 bp, Gossypium hirsutum
tccttttccccattaag

SEQ ID NO: 19412 - DNA, 22 bp, Gossypium hirsutum
gcagctcagaagcaagtctctt

SEQ ID NO: 19413 - DNA, 26 bp, Gossypium hirsutum
cattacccttatgcaaacctcgaatt

SEQ ID NO: 19414 - DNA, 15 bp, Gossypium hirsutum
caagagggcaaccag

SEQ ID NO: 19415 - DNA, 15 bp, Gossypium hirsutum
caagagggcagccag

SEQ ID NO: 19416 - DNA, 33 bp, Gossypium hirsutum
gaataaattttatagtgcatttgctaggtgcta

SEQ ID NO: 19417 - DNA, 26 bp, Gossypium hirsutum
tggttctggaactaaagcatcttgtt

SEQ ID NO: 19418 - DNA, 16 bp, Gossypium hirsutum
ttaacaccaatttctc

SEQ ID NO: 19419 - DNA, 16 bp, Gossypium hirsutum
ttaacaccactttctc

SEQ ID NO: 19420 - DNA, 20 bp, Gossypium hirsutum
cctgcttctgagtgcttgct

SEQ ID NO: 19421 - DNA, 23 bp, Gossypium hirsutum
ggcgctggaccatatatcatcac

SEQ ID NO: 19422 - DNA, 17 bp, Gossypium hirsutum
ccagatatttggcctcc

SEQ ID NO: 19423 - DNA, 18 bp, Gossypium hirsutum
cccagatattttgcctcc

SEQ ID NO: 19424 - DNA, 44 bp, Gossypium hirsutum
agttactttattcaaaggtacaaagatatttgatgtattagtta

SEQ ID NO: 19425 - DNA, 25 bp, Gossypium hirsutum
tgaactatcaagccaacacacgatt

SEQ ID NO: 19426 - DNA, 18 bp, Gossypium hirsutum
ttcgatttcaacatttac

SEQ ID NO: 19427 - DNA, 16 bp, Gossypium hirsutum
cgatttcagcatttac

SEQ ID NO: 19428 - DNA, 33 bp, Gossypium hirsutum
caagcatatagagtacaaattttataccgacct

SEQ ID NO: 19429 - DNA, 24 bp, Gossypium hirsutum
tctccaaagttcacatgcagttga

SEQ ID NO: 19430 - DNA, 18 bp, Gossypium hirsutum
taattgacacaaaccatg

SEQ ID NO: 19431 - DNA, 15 bp, Gossypium hirsutum
ttgacacgaaccatg

SEQ ID NO: 19432 - DNA, 28 bp, Gossypium hirsutum
acaaggtattgaacttgatgttgtcaca

SEQ ID NO: 19433 - DNA, 48 bp, Gossypium hirsutum
cacaacattgagtataaataatagaatttattaactttacttgaaact

SEQ ID NO: 19434 - DNA, 21 bp, Gossypium hirsutum
ctcaattcaaaaaaattttaa

SEQ ID NO: 19435 - DNA, 21 bp, Gossypium hirsutum
ctcaattcaaaaaatttttaa

SEQ ID NO: 19436 - DNA, 39 bp, Gossypium hirsutum
tggagtcgaattaagttaaaaaatttcgaattagttaag

SEQ ID NO: 19437 - DNA, 25 bp, Gossypium hirsutum
ccctgcaggtgaagattaagacaat

SEQ ID NO: 19438 - DNA, 17 bp, Gossypium hirsutum
agattctaagcaaaaat

SEQ ID NO: 19439 - DNA, 17 bp, Gossypium hirsutum
agattctaaacaaaaat

SEQ ID NO: 19440 - DNA, 25 bp, Gossypium hirsutum
gtggtcatgtcaaaactaccaggta

SEQ ID NO: 19441 - DNA, 22 bp, Gossypium hirsutum
cgtcagtagctgaaagcatgca

SEQ ID NO: 19442 - DNA, 16 bp, Gossypium hirsutum
atttgcataaaatttg

SEQ ID NO: 19443 - DNA, 15 bp, Gossypium hirsutum
atttgcataaatttg

SEQ ID NO: 19444 - DNA, 26 bp, Gossypium hirsutum
tcgtttgatcgttcagttgtaatggt

SEQ ID NO: 19445 - DNA, 22 bp, Gossypium hirsutum
gcaatactagccggagccatag

SEQ ID NO: 19446 - DNA, 22 bp, Gossypium hirsutum
attagaagacatatagtacccc

SEQ ID NO: 19447 - DNA, 17 bp, Gossypium hirsutum
aagacatacagtacccc

SEQ ID NO: 19448 - DNA, 32 bp, Gossypium hirsutum
cttcacggtggatactttatacgtattaaaga

SEQ ID NO: 19449 - DNA, 26 bp, Gossypium hirsutum
cgccgaatgaagaaaatgataaacca

SEQ ID NO: 19450 - DNA, 21 bp, Gossypium hirsutum
aatccctccttattcttgatg

SEQ ID NO: 19451 - DNA, 17 bp, Gossypium hirsutum
cctccttatgcttgatg

SEQ ID NO: 19452 - DNA, 29 bp, Gossypium hirsutum
ggatcctacaatacgtcaatatgtttggt

SEQ ID NO: 19453 - DNA, 27 bp, Gossypium hirsutum
tcggagaccatctgaaattatttcgtt

SEQ ID NO: 19454 - DNA, 17 bp, Gossypium hirsutum
ctactcctggacgaagg

SEQ ID NO: 19455 - DNA, 17 bp, Gossypium hirsutum
ctactcctgaacgaagg

SEQ ID NO: 19456 - DNA, 22 bp, Gossypium hirsutum
gccaccaaatacagagtctcga

SEQ ID NO: 19457 - DNA, 33 bp, Gossypium hirsutum
ctcttcttaaccattctcgttaagttaaatcct

SEQ ID NO: 19458 - DNA, 14 bp, Gossypium hirsutum
tcactcgaaattct

SEQ ID NO: 19459 - DNA, 14 bp, Gossypium hirsutum
tcactccaaattct

SEQ ID NO: 19460 - DNA, 25 bp, Gossypium hirsutum
tgttgttctttcaaacccctcttct

SEQ ID NO: 19461 - DNA, 32 bp, Gossypium hirsutum
gcgtattcttcaattgggtaattttaagtctt

SEQ ID NO: 19462 - DNA, 23 bp, Gossypium hirsutum
aataatagttagcctattaactg

SEQ ID NO: 19463 - DNA, 25 bp, Gossypium hirsutum
taaataatagttagtctattaactg

SEQ ID NO: 19464 - DNA, 34 bp, Gossypium hirsutum
tcatgtcaacttgttattttacatatcactcact

SEQ ID NO: 19465 - DNA, 37 bp, Gossypium hirsutum
gtttctgaaatattgtcatatttatgcacattaacga

SEQ ID NO: 19466 - DNA, 24 bp, Gossypium hirsutum
ccataagattaaactttatatatt

SEQ ID NO: 19467 - DNA, 23 bp, Gossypium hirsutum
cataagattaaactgtatatatt

SEQ ID NO: 19468 - DNA, 24 bp, Gossypium hirsutum
cggctacctacttgaaatgacagt

SEQ ID NO: 19469 - DNA, 25 bp, Gossypium hirsutum
ggcagagtgtaaaaggatacctgat

SEQ ID NO: 19470 - DNA, 19 bp, Gossypium hirsutum
aaaatcctctctcatcatt

SEQ ID NO: 19471 - DNA, 17 bp, Gossypium hirsutum
aatcctctcccatcatt

SEQ ID NO: 19472 - DNA, 24 bp, Gossypium hirsutum
ggtggcaagggttagatctatctc

SEQ ID NO: 19473 - DNA, 30 bp, Gossypium hirsutum
actgaatcaaataaatggcaaaaaccgtta

SEQ ID NO: 19474 - DNA, 20 bp, Gossypium hirsutum
ctcacaatatatagagaatg

SEQ ID NO: 19475 - DNA, 18 bp, Gossypium hirsutum
cacaatgtatagagaatg

SEQ ID NO: 19476 - DNA, 22 bp, Gossypium hirsutum
ggccagtgttattctccatgct

SEQ ID NO: 19477 - DNA, 28 bp, Gossypium hirsutum
caccccctatccttcttaaaataaacct

SEQ ID NO: 19478 - DNA, 16 bp, Gossypium hirsutum
tgaatggatgaaacct

SEQ ID NO: 19479 - DNA, 18 bp, Gossypium hirsutum
tatgaatggataaaacct

SEQ ID NO: 19480 - DNA, 28 bp, Gossypium hirsutum
acacaaaccaagagatgtttgaatagga

SEQ ID NO: 19481 - DNA, 25 bp, Gossypium hirsutum
ggaagttcagcaagacatgagagat

SEQ ID NO: 19482 - DNA, 20 bp, Gossypium hirsutum
ctttgtgctgtaaattgtaa

SEQ ID NO: 19483 - DNA, 20 bp, Gossypium hirsutum
ctttgtgctgtaatttgtaa

SEQ ID NO: 19484 - DNA, 31 bp, Gossypium hirsutum
gtacctattcaatttttgaaatggtcaggtt

SEQ ID NO: 19485 - DNA, 25 bp, Gossypium hirsutum
ccaggccatatgcattatctgacaa

SEQ ID NO: 19486 - DNA, 17 bp, Gossypium hirsutum
catcagactgaacaaat

SEQ ID NO: 19487 - DNA, 16 bp, Gossypium hirsutum
atcagactgagcaaat

SEQ ID NO: 19488 - DNA, 34 bp, Gossypium hirsutum
gtcaaatttcaatatgatttagtgcttttttccc

SEQ ID NO: 19489 - DNA, 25 bp, Gossypium hirsutum
ggagaaaccggcaacttatatgaca

SEQ ID NO: 19490 - DNA, 18 bp, Gossypium hirsutum
ttcaccagctatataatt

SEQ ID NO: 19491 - DNA, 15 bp, Gossypium hirsutum
accagctgtataatt

SEQ ID NO: 19492 - DNA, 26 bp, Gossypium hirsutum
tgttaacaatggatcgcttccaaaga

SEQ ID NO: 19493 - DNA, 27 bp, Gossypium hirsutum
gccaaaatcagaaatctggaatcacat

SEQ ID NO: 19494 - DNA, 25 bp, Gossypium hirsutum
cattatcgttctaaagatttacctt

SEQ ID NO: 19495 - DNA, 21 bp, Gossypium hirsutum
atcgttctaaagatgtacctt

SEQ ID NO: 19496 - DNA, 25 bp, Gossypium hirsutum
ccgagaactttgatgctcaggtaaa

SEQ ID NO: 19497 - DNA, 21 bp, Gossypium hirsutum
ctgtttagggccaccatcagt

SEQ ID NO: 19498 - DNA, 17 bp, Gossypium hirsutum
ttagctggtggctgaca

SEQ ID NO: 19499 - DNA, 17 bp, Gossypium hirsutum
ttagctggtgactgaca

SEQ ID NO: 19500 - DNA, 23 bp, Gossypium hirsutum
caagtgtagcagccaatgtcttc

SEQ ID NO: 19501 - DNA, 21 bp, Gossypium hirsutum
gcagaacgtagaacccttgct

SEQ ID NO: 19502 - DNA, 16 bp, Gossypium hirsutum
cttatgcagggtgctg

SEQ ID NO: 19503 - DNA, 17 bp, Gossypium hirsutum
ccttatgcagagtgctg

SEQ ID NO: 19504 - DNA, 19 bp, Gossypium hirsutum
tcgacatgcagtgcaccat

SEQ ID NO: 19505 - DNA, 29 bp, Gossypium hirsutum
cccaatgcatgtaagtaaagtacaagtac

SEQ ID NO: 19506 - DNA, 18 bp, Gossypium hirsutum
taacatccaaaagatttg

SEQ ID NO: 19507 - DNA, 18 bp, Gossypium hirsutum
taacatccaatagatttg

SEQ ID NO: 19508 - DNA, 27 bp, Gossypium hirsutum
gccaaaaaataatgcaaatgacaagct

SEQ ID NO: 19509 - DNA, 30 bp, Gossypium hirsutum
tgatgtgttcaatggtatcatgtgtttaga

SEQ ID NO: 19510 - DNA, 17 bp, Gossypium hirsutum
cttccactacgttcacg

SEQ ID NO: 19511 - DNA, 16 bp, Gossypium hirsutum
ttccactacattcacg

SEQ ID NO: 19512 - DNA, 32 bp, Gossypium hirsutum
aaaatgcagtttcactatctttacagttttgt

SEQ ID NO: 19513 - DNA, 30 bp, Gossypium hirsutum
ttcgatcaaagagtaaattggtctttctga

SEQ ID NO: 19514 - DNA, 19 bp, Gossypium hirsutum
acagaaaagatcaatttat

SEQ ID NO: 19515 - DNA, 22 bp, Gossypium hirsutum
ttaacagaaaagattaatttat

SEQ ID NO: 19516 - DNA, 26 bp, Gossypium hirsutum
catcctttaggagtgagttcaaacct

SEQ ID NO: 19517 - DNA, 33 bp, Gossypium hirsutum
ccctaaaatttctcattcacattttgagttcta

SEQ ID NO: 19518 - DNA, 24 bp, Gossypium hirsutum
aagtttttataaaaaaaaattcca

SEQ ID NO: 19519 - DNA, 24 bp, Gossypium hirsutum
aagtttttataaaaaaaatttcca

SEQ ID NO: 19520 - DNA, 29 bp, Gossypium hirsutum
tgtgtgaaattaggcaatcatgataacct

SEQ ID NO: 19521 - DNA, 20 bp, Gossypium hirsutum
gtgctgctgaacctgattgg

SEQ ID NO: 19522 - DNA, 22 bp, Gossypium hirsutum
cttaatcttggcatactgttat

SEQ ID NO: 19523 - DNA, 17 bp, Gossypium hirsutum
tcttggcgtactgttat

SEQ ID NO: 19524 - DNA, 21 bp, Gossypium hirsutum
acggtgaacacctgagcattc

SEQ ID NO: 19525 - DNA, 29 bp, Gossypium hirsutum
ccaaaacttaaaaataaagagggctgcat

SEQ ID NO: 19526 - DNA, 16 bp, Gossypium hirsutum
accagctctgaccatg

SEQ ID NO: 19527 - DNA, 14 bp, Gossypium hirsutum
cagctcagaccatg

SEQ ID NO: 19528 - DNA, 23 bp, Gossypium hirsutum
tggtaggctgctgcaaaatctta

SEQ ID NO: 19529 - DNA, 25 bp, Gossypium hirsutum
acgcatagaaatggtaatggtcctt

SEQ ID NO: 19530 - DNA, 23 bp, Gossypium hirsutum
ttgcaaaaaatttaatatttctt

SEQ ID NO: 19531 - DNA, 23 bp, Gossypium hirsutum
ttgcaaaaaatttaatattactt

SEQ ID NO: 19532 - DNA, 29 bp, Gossypium hirsutum
tctaagtatctttgttgtcgttttcccaa

SEQ ID NO: 19533 - DNA, 24 bp, Gossypium hirsutum
gcttggcctgggtaccatataatg

SEQ ID NO: 19534 - DNA, 17 bp, Gossypium hirsutum
aaatcatatgcgctctc

SEQ ID NO: 19535 - DNA, 17 bp, Gossypium hirsutum
aaatcataagcgctctc

SEQ ID NO: 19536 - DNA, 23 bp, Gossypium hirsutum
agtagaatccagccaagcttcac

SEQ ID NO: 19537 - DNA, 23 bp, Gossypium hirsutum
caaggcagcagttgaaaacatca

SEQ ID NO: 19538 - DNA, 18 bp, Gossypium hirsutum
caatgatgtttgaacact

SEQ ID NO: 19539 - DNA, 19 bp, Gossypium hirsutum
ccaatgatgttttaacact

SEQ ID NO: 19540 - DNA, 25 bp, Gossypium hirsutum
tgaaccaatttcccatcacctcaat

SEQ ID NO: 19541 - DNA, 24 bp, Gossypium hirsutum
ggagcccccaagaatatttacagt

SEQ ID NO: 19542 - DNA, 17 bp, Gossypium hirsutum
cgctttatccgtcccat

SEQ ID NO: 19543 - DNA, 17 bp, Gossypium hirsutum
cgctttatccatcccat

SEQ ID NO: 19544 - DNA, 25 bp, Gossypium hirsutum
tggcttcatcgacagattatgttgt

SEQ ID NO: 19545 - DNA, 28 bp, Gossypium hirsutum
cccaatgtatcagatcctttatcaagct

SEQ ID NO: 19546 - DNA, 17 bp, Gossypium hirsutum
ccttcaacaacctcttc

SEQ ID NO: 19547 - DNA, 16 bp, Gossypium hirsutum
cttcaacaagctcttc

SEQ ID NO: 19548 - DNA, 24 bp, Gossypium hirsutum
gccgaagacagctataaacttggt

SEQ ID NO: 19549 - DNA, 25 bp, Gossypium hirsutum
tccccaaaagaggaaattgtctcaa

SEQ ID NO: 19550 - DNA, 17 bp, Gossypium hirsutum
aaaccctacgacagacc

SEQ ID NO: 19551 - DNA, 18 bp, Gossypium hirsutum
aaaaccctaagacagacc

SEQ ID NO: 19552 - DNA, 24 bp, Gossypium hirsutum
tcggatgatgttgattgcagttca

SEQ ID NO: 19553 - DNA, 29 bp, Gossypium hirsutum
tgacttagaatgatttctccatccaggta

SEQ ID NO: 19554 - DNA, 20 bp, Gossypium hirsutum
caaggaagttccctgacaga

SEQ ID NO: 19555 - DNA, 19 bp, Gossypium hirsutum
aaggaagttccctaacaga

SEQ ID NO: 19556 - DNA, 25 bp, Gossypium hirsutum
gccaaaaatccatcatttgggagtt

SEQ ID NO: 19557 - DNA, 24 bp, Gossypium hirsutum
gtgcctgatattgcttggattcaa

SEQ ID NO: 19558 - DNA, 16 bp, Gossypium hirsutum
tcgtcaccttgccctt

SEQ ID NO: 19559 - DNA, 17 bp, Gossypium hirsutum
ttcgtcaccttaccctt

SEQ ID NO: 19560 - DNA, 28 bp, Gossypium hirsutum
cagaatagtacccgatgtaatagcgaaa

SEQ ID NO: 19561 - DNA, 30 bp, Gossypium hirsutum
ggtcggtaatgttaaagaaccttttcattt

SEQ ID NO: 19562 - DNA, 17 bp, Gossypium hirsutum
caggacttacatccttg

SEQ ID NO: 19563 - DNA, 16 bp, Gossypium hirsutum
caggacttaatccttg

SEQ ID NO: 19564 - DNA, 24 bp, Gossypium hirsutum
acctagcttcagacattccattcg

SEQ ID NO: 19565 - DNA, 28 bp, Gossypium hirsutum
tgtggcttaaactcatccgatactatct

SEQ ID NO: 19566 - DNA, 15 bp, Gossypium hirsutum
ttgttccaggaattg

SEQ ID NO: 19567 - DNA, 16 bp, Gossypium hirsutum
cttgttccatgaattg

SEQ ID NO: 19568 - DNA, 38 bp, Gossypium hirsutum
acgtagctattaggataaacttaaaaaatgattaacct

SEQ ID NO: 19569 - DNA, 30 bp, Gossypium hirsutum
gatctctctttcccttaatatactctccct

SEQ ID NO: 19570 - DNA, 16 bp, Gossypium hirsutum
cagtttgtaacgtccc

SEQ ID NO: 19571 - DNA, 16 bp, Gossypium hirsutum
cagtttgtagcgtccc

SEQ ID NO: 19572 - DNA, 25 bp, Gossypium hirsutum
cgatccgaaaccgatagagattcaa

SEQ ID NO: 19573 - DNA, 29 bp, Gossypium hirsutum
agctcaatctgttcatctgtattttgaca

SEQ ID NO: 19574 - DNA, 22 bp, Gossypium hirsutum
ttttattgcttctgtcctttag

SEQ ID NO: 19575 - DNA, 17 bp, Gossypium hirsutum
ttgcttctgtcgtttag

SEQ ID NO: 19576 - DNA, 27 bp, Gossypium hirsutum
tccagctccaacctcatttttttatga

SEQ ID NO: 19577 - DNA, 16 bp, Gossypium hirsutum
gcaacagcggcagcaa

SEQ ID NO: 19578 - DNA, 21 bp, Gossypium hirsutum
catggttagcattttcactta

SEQ ID NO: 19579 - DNA, 20 bp, Gossypium hirsutum
atggttagcattttcgctta

SEQ ID NO: 19580 - DNA, 35 bp, Gossypium hirsutum
tggtaattatatttgttgttaacctagaccaaact

SEQ ID NO: 19581 - DNA, 24 bp, Gossypium hirsutum
ttgttgctaccaaggttcaatcct

SEQ ID NO: 19582 - DNA, 22 bp, Gossypium hirsutum
aaacaatatgatcagtataaaa

SEQ ID NO: 19583 - DNA, 19 bp, Gossypium hirsutum
caatatgatcggtataaaa

SEQ ID NO: 19584 - DNA, 25 bp, Gossypium hirsutum
agcatggcaagattacattgatcca

SEQ ID NO: 19585 - DNA, 26 bp, Gossypium hirsutum
aagccctcttatgacattcccttttt

SEQ ID NO: 19586 - DNA, 20 bp, Gossypium hirsutum
ctcctttctcattagtcatt

SEQ ID NO: 19587 - DNA, 18 bp, Gossypium hirsutum
cctttctcattggtcatt

SEQ ID NO: 19588 - DNA, 29 bp, Gossypium hirsutum
cgtcatatgatctcaattatggagtccaa

SEQ ID NO: 19589 - DNA, 25 bp, Gossypium hirsutum
tgtcacagagggctgcctaaatata

SEQ ID NO: 19590 - DNA, 24 bp, Gossypium hirsutum
cagtcatgtatttttatgtagctt

SEQ ID NO: 19591 - DNA, 24 bp, Gossypium hirsutum
cagtcatgtatttttatttagctt

SEQ ID NO: 19592 - DNA, 25 bp, Gossypium hirsutum
gcttgtaaacagaaggagagctaca

SEQ ID NO: 19593 - DNA, 26 bp, Gossypium hirsutum
ccttgcatctctccacataccaaaaa

SEQ ID NO: 19594 - DNA, 24 bp, Gossypium hirsutum
tctaataaagataaaaaaaaagtg

SEQ ID NO: 19595 - DNA, 22 bp, Gossypium hirsutum
ctaataaagataaaaaaaagtg

SEQ ID NO: 19596 - DNA, 36 bp, Gossypium hirsutum
tcaggtactaaaattttgaagataaagctaaactct

SEQ ID NO: 19597 - DNA, 26 bp, Gossypium hirsutum
ctgaggatgtctttaaggttgaagga

SEQ ID NO: 19598 - DNA, 21 bp, Gossypium hirsutum
catagtaatacgaggtttcga

SEQ ID NO: 19599 - DNA, 20 bp, Gossypium hirsutum
atagtaatacgacgtttcga

SEQ ID NO: 19600 - DNA, 24 bp, Gossypium hirsutum
ccctaccattggagaaacttcgtt

SEQ ID NO: 19601 - DNA, 27 bp, Gossypium hirsutum
cccttaagacagtacaaattccagcat

SEQ ID NO: 19602 - DNA, 21 bp, Gossypium hirsutum
aaaatatgacaatgatgttca

SEQ ID NO: 19603 - DNA, 21 bp, Gossypium hirsutum
aaaatatgacaatggtgttca

SEQ ID NO: 19604 - DNA, 25 bp, Gossypium hirsutum
gacgcctacaggtatatgaacttgt

SEQ ID NO: 19605 - DNA, 25 bp, Gossypium hirsutum
gcctctatttgatctggaccaatct

SEQ ID NO: 19606 - DNA, 23 bp, Gossypium hirsutum
ttgaattaattgaagtttttttt

SEQ ID NO: 19607 - DNA, 24 bp, Gossypium hirsutum
tttgaattaattaaagtttttttt

SEQ ID NO: 19608 - DNA, 28 bp, Gossypium hirsutum
gctaaaattctagcatgctctttgttgt

SEQ ID NO: 19609 - DNA, 21 bp, Gossypium hirsutum
gacgaaataacgcaacaggct

SEQ ID NO: 19610 - DNA, 21 bp, Gossypium hirsutum
ttcaaaactagaaaaatcaca

SEQ ID NO: 19611 - DNA, 19 bp, Gossypium hirsutum
caaaactagaaagatcaca

SEQ ID NO: 19612 - DNA, 25 bp, Gossypium hirsutum
gcagaggagaagtatgacagtaact

SEQ ID NO: 19613 - DNA, 23 bp, Gossypium hirsutum
gaaaagagctagggaacttgcca

SEQ ID NO: 19614 - DNA, 16 bp, Gossypium hirsutum
ctaagaacatttttcc

SEQ ID NO: 19615 - DNA, 16 bp, Gossypium hirsutum
ctaagaacaattttcc

SEQ ID NO: 19616 - DNA, 24 bp, Gossypium hirsutum
attacacaaatggccaacagcaaa

SEQ ID NO: 19617 - DNA, 35 bp, Gossypium hirsutum
actgatagtagactttatttctctaataaccccaa

SEQ ID NO: 19618 - DNA, 18 bp, Gossypium hirsutum
aacagagtacagtaaaag

SEQ ID NO: 19619 - DNA, 17 bp, Gossypium hirsutum
acagagtagagtaaaag

SEQ ID NO: 19620 - DNA, 22 bp, Gossypium hirsutum
actggcctcatcaaggttttcc

SEQ ID NO: 19621 - DNA, 29 bp, Gossypium hirsutum
ggaagtctaggtttgagattgaatttgga

SEQ ID NO: 19622 - DNA, 21 bp, Gossypium hirsutum
attgtatcgtattgcttattt

SEQ ID NO: 19623 - DNA, 22 bp, Gossypium hirsutum
cattgtatcgtatttcttattt

SEQ ID NO: 19624 - DNA, 25 bp, Gossypium hirsutum
ccaacgaggtgagaacatgtatttc

SEQ ID NO: 19625 - DNA, 25 bp, Gossypium hirsutum
gcttaatgatagtgccaacctctga

SEQ ID NO: 19626 - DNA, 18 bp, Gossypium hirsutum
tttgtaaaaggcaaaaga

SEQ ID NO: 19627 - DNA, 18 bp, Gossypium hirsutum
tttgtaaaaagcaaaaga

SEQ ID NO: 19628 - DNA, 25 bp, Gossypium hirsutum
tccagattgcgagaagacacaaaat

SEQ ID NO: 19629 - DNA, 25 bp, Gossypium hirsutum
agcggaaaagccagaaaattttgtt

SEQ ID NO: 19630 - DNA, 17 bp, Gossypium hirsutum
cagctccctcctagatt

SEQ ID NO: 19631 - DNA, 17 bp, Gossypium hirsutum
cagctccctcttagatt

SEQ ID NO: 19632 - DNA, 29 bp, Gossypium hirsutum
tgaaaaactcaaaattcagatgtcatccg

SEQ ID NO: 19633 - DNA, 25 bp, Gossypium hirsutum
gtgcatgatcacattgtcaattcca

SEQ ID NO: 19634 - DNA, 17 bp, Gossypium hirsutum
catcatctccgacttta

SEQ ID NO: 19635 - DNA, 18 bp, Gossypium hirsutum
ccatcatctcctacttta

SEQ ID NO: 19636 - DNA, 25 bp, Gossypium hirsutum
aggcaacacgaatcatatggttctt

SEQ ID NO: 19637 - DNA, 23 bp, Gossypium hirsutum
gtcagacaccgtaagtcaatcga

SEQ ID NO: 19638 - DNA, 19 bp, Gossypium hirsutum
aactcaattgcccctggca

SEQ ID NO: 19639 - DNA, 17 bp, Gossypium hirsutum
ctcaattgcctctggca

SEQ ID NO: 19640 - DNA, 25 bp, Gossypium hirsutum
cctgaagctcaaggtaggaaattct

SEQ ID NO: 19641 - DNA, 24 bp, Gossypium hirsutum
cgccacaaattttagcagcgttag

SEQ ID NO: 19642 - DNA, 17 bp, Gossypium hirsutum
caatagtgacgtttttt

SEQ ID NO: 19643 - DNA, 15 bp, Gossypium hirsutum
atagtggcgtttttt

SEQ ID NO: 19644 - DNA, 22 bp, Gossypium hirsutum
cctttagcggcgcttttaagtg

SEQ ID NO: 19645 - DNA, 27 bp, Gossypium hirsutum
gttgtacttttttccaaactccatgca

SEQ ID NO: 19646 - DNA, 19 bp, Gossypium hirsutum
cgaaaattatgccaatata

SEQ ID NO: 19647 - DNA, 20 bp, Gossypium hirsutum
acgaaaattatgtcaatata

SEQ ID NO: 19648 - DNA, 30 bp, Gossypium hirsutum
gctaaagctagtatcggaaatttaaatgca

SEQ ID NO: 19649 - DNA, 25 bp, Gossypium hirsutum
tcagacatacacacacgttcacatc

SEQ ID NO: 19650 - DNA, 19 bp, Gossypium hirsutum
acaaactcaaagactaacc

SEQ ID NO: 19651 - DNA, 17 bp, Gossypium hirsutum
aaactcaaaggctaacc

SEQ ID NO: 19652 - DNA, 26 bp, Gossypium hirsutum
tggttgagggttgattctcattttga

SEQ ID NO: 19653 - DNA, 27 bp, Gossypium hirsutum
ccaatttttgcattactttgtgttgca

SEQ ID NO: 19654 - DNA, 16 bp, Gossypium hirsutum
caacagaaatattctc

SEQ ID NO: 19655 - DNA, 16 bp, Gossypium hirsutum
caacagaaacattctc

SEQ ID NO: 19656 - DNA, 26 bp, Gossypium hirsutum
tgcatattctcgcacatcaaaatcct

SEQ ID NO: 19657 - DNA, 42 bp, Gossypium hirsutum
gctttgaactgtatattggtataattttggtttatttaatga

SEQ ID NO: 19658 - DNA, 19 bp, Gossypium hirsutum
attcgtagtctaaaggctt

SEQ ID NO: 19659 - DNA, 16 bp, Gossypium hirsutum
cgtagtctcaaggctt

SEQ ID NO: 19660 - DNA, 24 bp, Gossypium hirsutum
gctcacagccaaacgtttcctata

SEQ ID NO: 19661 - DNA, 27 bp, Gossypium hirsutum
atggccatcattcgagaaagagtaaat

SEQ ID NO: 19662 - DNA, 23 bp, Gossypium hirsutum
ttttcttacaggtttaagtctga

SEQ ID NO: 19663 - DNA, 19 bp, Gossypium hirsutum
cttacaggtttaaatctga

SEQ ID NO: 19664 - DNA, 25 bp, Gossypium hirsutum
cctatcctcactgcactttctttgt

SEQ ID NO: 19665 - DNA, 23 bp, Gossypium hirsutum
acaagactaggccaaacggaaaa

SEQ ID NO: 19666 - DNA, 20 bp, Gossypium hirsutum
tgattaggtttgcttttatt

SEQ ID NO: 19667 - DNA, 20 bp, Gossypium hirsutum
tgattaggtttccttttatt

SEQ ID NO: 19668 - DNA, 30 bp, Gossypium hirsutum
cggctgaattaatgttttgcaatttttgtt

SEQ ID NO: 19669 - DNA, 28 bp, Gossypium hirsutum
tgtaattacccatgctatcaggctctaa

SEQ ID NO: 19670 - DNA, 17 bp, Gossypium hirsutum
tcctgaactcatccaac

SEQ ID NO: 19671 - DNA, 16 bp, Gossypium hirsutum
cctgaactcgtccaac

SEQ ID NO: 19672 - DNA, 29 bp, Gossypium hirsutum
tccccctgaattaagataatagagctcat

SEQ ID NO: 19673 - DNA, 30 bp, Gossypium hirsutum
ggagtatcctttccaacactttcattaact

SEQ ID NO: 19674 - DNA, 19 bp, Gossypium hirsutum
tcatcctcactacctttat

SEQ ID NO: 19675 - DNA, 18 bp, Gossypium hirsutum
catcctcacttcctttat

SEQ ID NO: 19676 - DNA, 31 bp, Gossypium hirsutum
agggaaaaggaaatgaaataatactgtgtca

SEQ ID NO: 19677 - DNA, 30 bp, Gossypium hirsutum
gggattttagagaattgaatgtgactgcta

SEQ ID NO: 19678 - DNA, 19 bp, Gossypium hirsutum
ttgtggttaaaccatttaa

SEQ ID NO: 19679 - DNA, 20 bp, Gossypium hirsutum
cttgtggttaaactatttaa

SEQ ID NO: 19680 - DNA, 34 bp, Gossypium hirsutum
actccaaatttttctttggataagtttaaaagca

SEQ ID NO: 19681 - DNA, 23 bp, Gossypium hirsutum
ggaaggaacagaagacggaaagg

SEQ ID NO: 19682 - DNA, 14 bp, Gossypium hirsutum
ccctcccgatcgac

SEQ ID NO: 19683 - DNA, 17 bp, Gossypium hirsutum
tttaccctcccatcgac

SEQ ID NO: 19684 - DNA, 25 bp, Gossypium hirsutum
tcagtttaggcactgcttcagtttt

SEQ ID NO: 19685 - DNA, 25 bp, Gossypium hirsutum
cgtagtacgtaataggtcccacttc

SEQ ID NO: 19686 - DNA, 20 bp, Gossypium hirsutum
atcggacaatcatctacatt

SEQ ID NO: 19687 - DNA, 18 bp, Gossypium hirsutum
cggacaatcatatacatt

SEQ ID NO: 19688 - DNA, 27 bp, Gossypium hirsutum
tccacttgggtaatacaatctcaaacg

SEQ ID NO: 19689 - DNA, 32 bp, Gossypium hirsutum
ttttaagtagtcgagtgtttgaataagacagt

SEQ ID NO: 19690 - DNA, 22 bp, Gossypium hirsutum
cttaacgttacatagtaggctt

SEQ ID NO: 19691 - DNA, 17 bp, Gossypium hirsutum
cgttacatagtgggctt

SEQ ID NO: 19692 - DNA, 20 bp, Gossypium hirsutum
gcaaaagccagtgtgcaatg

SEQ ID NO: 19693 - DNA, 27 bp, Gossypium hirsutum
tcacccatgagctttacctaatttcag

SEQ ID NO: 19694 - DNA, 15 bp, Gossypium hirsutum
cccgacctgacccga

SEQ ID NO: 19695 - DNA, 15 bp, Gossypium hirsutum
cccgacttgacccga

SEQ ID NO: 19696 - DNA, 35 bp, Gossypium hirsutum
atgttagattttcttttaagtcaagttgtgtttga

SEQ ID NO: 19697 - DNA, 24 bp, Gossypium hirsutum
accctttactgaatggttgcatgt

SEQ ID NO: 19698 - DNA, 18 bp, Gossypium hirsutum
ctagtccggatgacacaa

SEQ ID NO: 19699 - DNA, 18 bp, Gossypium hirsutum
ctagtccggataacacaa

SEQ ID NO: 19700 - DNA, 25 bp, Gossypium hirsutum
gggtctccatggtacttttactgtt

SEQ ID NO: 19701 - DNA, 24 bp, Gossypium hirsutum
tgctgaaattatggaagggcagat

SEQ ID NO: 19702 - DNA, 18 bp, Gossypium hirsutum
cagctctactgttatctt

SEQ ID NO: 19703 - DNA, 17 bp, Gossypium hirsutum
agctctactgctatctt

SEQ ID NO: 19704 - DNA, 22 bp, Gossypium hirsutum
gagaagcccaaagaaggcctaa

SEQ ID NO: 19705 - DNA, 25 bp, Gossypium hirsutum
gcaagttggcctagaatgttcagta

SEQ ID NO: 19706 - DNA, 19 bp, Gossypium hirsutum
aagtctctcatctggagcc

SEQ ID NO: 19707 - DNA, 18 bp, Gossypium hirsutum
agtctctcatatggagcc

SEQ ID NO: 19708 - DNA, 33 bp, Gossypium hirsutum
tgatcttctttaatttcgtaactgtctctttca

SEQ ID NO: 19709 - DNA, 28 bp, Gossypium hirsutum
tcaatatacccctaatgagaccatccaa

SEQ ID NO: 19710 - DNA, 17 bp, Gossypium hirsutum
ctcgtattgctgaattt

SEQ ID NO: 19711 - DNA, 17 bp, Gossypium hirsutum
ctcgtattcctgaattt

SEQ ID NO: 19712 - DNA, 28 bp, Gossypium hirsutum
gctatcctcatattcagcatggtattca

SEQ ID NO: 19713 - DNA, 24 bp, Gossypium hirsutum
caaaacagacttcactgccgatac

SEQ ID NO: 19714 - DNA, 14 bp, Gossypium hirsutum
ccatcaagttggcg

SEQ ID NO: 19715 - DNA, 14 bp, Gossypium hirsutum
ccatcaaattggcg

SEQ ID NO: 19716 - DNA, 34 bp, Gossypium hirsutum
tgttcctaatctatgaaatattctatgctttgca

SEQ ID NO: 19717 - DNA, 45 bp, Gossypium hirsutum
catgtatcacatgcaaacatattaaattattgttttataatcaat

SEQ ID NO: 19718 - DNA, 14 bp, Gossypium hirsutum
acttgccatttttc

SEQ ID NO: 19719 - DNA, 17 bp, Gossypium hirsutum
ttaaacttgcctttttc

SEQ ID NO: 19720 - DNA, 29 bp, Gossypium hirsutum
cacattagtcaaaaaaaccacaagtacca

SEQ ID NO: 19721 - DNA, 25 bp, Gossypium hirsutum
gcaaagatcacgcaactgatttcat

SEQ ID NO: 19722 - DNA, 17 bp, Gossypium hirsutum
ccattgcatccatacaa

SEQ ID NO: 19723 - DNA, 16 bp, Gossypium hirsutum
cattgcgtccatacaa

SEQ ID NO: 19724 - DNA, 43 bp, Gossypium hirsutum
gtcttatattgatcttttttaaatgtaacctattcttcaacat

SEQ ID NO: 19725 - DNA, 34 bp, Gossypium hirsutum
cgttttgaaatactcaaaatcacacttttttaca

SEQ ID NO: 19726 - DNA, 24 bp, Gossypium hirsutum
attaatactaatcgaactaatatt

SEQ ID NO: 19727 - DNA, 25 bp, Gossypium hirsutum
tattaatactaattgaactaatatt

SEQ ID NO: 19728 - DNA, 26 bp, Gossypium hirsutum
tcatgatatgcgtcatttccatcact

SEQ ID NO: 19729 - DNA, 25 bp, Gossypium hirsutum
caacaatcgtctctaccttcgagtt

SEQ ID NO: 19730 - DNA, 19 bp, Gossypium hirsutum
cctaggtgtatcgagtcag

SEQ ID NO: 19731 - DNA, 18 bp, Gossypium hirsutum
ctaggtgtatcaagtcag

SEQ ID NO: 19732 - DNA, 28 bp, Gossypium hirsutum
gttattgcttcttctatgttcccgatct

SEQ ID NO: 19733 - DNA, 33 bp, Gossypium hirsutum
tcagtcaatgttaaattatctctttattcccgt

SEQ ID NO: 19734 - DNA, 22 bp, Gossypium hirsutum
atcaaatattgttccataagac

SEQ ID NO: 19735 - DNA, 20 bp, Gossypium hirsutum
caaatattgttccgtaagac

SEQ ID NO: 19736 - DNA, 30 bp, Gossypium hirsutum
tgttacaatgtacatacccttagcagtttt

SEQ ID NO: 19737 - DNA, 25 bp, Gossypium hirsutum
gctccattgatcatgggaaattcca

SEQ ID NO: 19738 - DNA, 16 bp, Gossypium hirsutum
tccttcacagctccgg

SEQ ID NO: 19739 - DNA, 16 bp, Gossypium hirsutum
tccttcacatctccgg

SEQ ID NO: 19740 - DNA, 25 bp, Gossypium hirsutum
gaccgtatgaatggagattgaacgt

SEQ ID NO: 19741 - DNA, 25 bp, Gossypium hirsutum
tctattggccgtgttattcgaactc

SEQ ID NO: 19742 - DNA, 16 bp, Gossypium hirsutum
cacacccatggtcaag

SEQ ID NO: 19743 - DNA, 17 bp, Gossypium hirsutum
tcacacccatagtcaag

SEQ ID NO: 19744 - DNA, 27 bp, Gossypium hirsutum
ggcctccataaaaaatttctggattcg

SEQ ID NO: 19745 - DNA, 30 bp, Gossypium hirsutum
ctgctgtggcttttatttataatctttgca

SEQ ID NO: 19746 - DNA, 18 bp, Gossypium hirsutum
catttggctattgttgtt

SEQ ID NO: 19747 - DNA, 17 bp, Gossypium hirsutum
atttggctgttgttgtt

SEQ ID NO: 19748 - DNA, 46 bp, Gossypium hirsutum
ctcaaactacaagtataatctagtaaatatatgagtattcagtttt

SEQ ID NO: 19749 - DNA, 18 bp, Gossypium hirsutum
ttgcatgaggcggaagct

SEQ ID NO: 19750 - DNA, 14 bp, Gossypium hirsutum
ctgctccaagttca

SEQ ID NO: 19751 - DNA, 14 bp, Gossypium hirsutum
ctgctccgagttca

SEQ ID NO: 19752 - DNA, 24 bp, Gossypium hirsutum
tgacaagtagcaatgtgctggtag

SEQ ID NO: 19753 - DNA, 25 bp, Gossypium hirsutum
cgtcaggagagaagtcagaacaatt

SEQ ID NO: 19754 - DNA, 16 bp, Gossypium hirsutum
catccggcctcctcta

SEQ ID NO: 19755 - DNA, 13 bp, Gossypium hirsutum
ccggccccctcta

SEQ ID NO: 19756 - DNA, 31 bp, Gossypium hirsutum
gcactttggccccttaaaattataaaaattc

SEQ ID NO: 19757 - DNA, 24 bp, Gossypium hirsutum
gaagagttccgaattccacaacac

SEQ ID NO: 19758 - DNA, 14 bp, Gossypium hirsutum
agtttgggattttc

SEQ ID NO: 19759 - DNA, 14 bp, Gossypium hirsutum
agtttggaattttc

SEQ ID NO: 19760 - DNA, 23 bp, Gossypium hirsutum
ctccatgcaggtgtaaactctgt

SEQ ID NO: 19761 - DNA, 30 bp, Gossypium hirsutum
agggaaaaaaaaagtgtaaaagcagaagaa

SEQ ID NO: 19762 - DNA, 21 bp, Gossypium hirsutum
tgctactataaaaaaaattta

SEQ ID NO: 19763 - DNA, 20 bp, Gossypium hirsutum
tgctactataaaaaaattta

SEQ ID NO: 19764 - DNA, 23 bp, Gossypium hirsutum
gatgcagctagttccgaggaaaa

SEQ ID NO: 19765 - DNA, 22 bp, Gossypium hirsutum
tgccaccacaaggatgattagg

SEQ ID NO: 19766 - DNA, 20 bp, Gossypium hirsutum
ctaaaattaaacagatttgc

SEQ ID NO: 19767 - DNA, 19 bp, Gossypium hirsutum
taaaattaaacaaatttgc

SEQ ID NO: 19768 - DNA, 32 bp, Gossypium hirsutum
gttaccaaatattcatggaaaaggagaatgtt

SEQ ID NO: 19769 - DNA, 25 bp, Gossypium hirsutum
tggtcttgtcaaccctacattcatt

SEQ ID NO: 19770 - DNA, 21 bp, Gossypium hirsutum
tattttggcttctcctatatg

SEQ ID NO: 19771 - DNA, 18 bp, Gossypium hirsutum
ttttggcttccctatatg

SEQ ID NO: 19772 - DNA, 29 bp, Gossypium hirsutum
gcagctgatttgattttccttttgactta

SEQ ID NO: 19773 - DNA, 22 bp, Gossypium hirsutum
ccgactgatcctgcacctaaaa

SEQ ID NO: 19774 - DNA, 23 bp, Gossypium hirsutum
actaggtaaatactaccgtaaat

SEQ ID NO: 19775 - DNA, 22 bp, Gossypium hirsutum
ctaggtaaatactacagtaaat

SEQ ID NO: 19776 - DNA, 40 bp, Gossypium hirsutum
agtttatcattaagtgtgaaaacatcattgtttaatacat

SEQ ID NO: 19777 - DNA, 27 bp, Gossypium hirsutum
cccctttctccgatatatttgattcga

SEQ ID NO: 19778 - DNA, 21 bp, Gossypium hirsutum
ttgaaatttcatcctttatca

SEQ ID NO: 19779 - DNA, 20 bp, Gossypium hirsutum
tgaaatttcatcatttatca

SEQ ID NO: 19780 - DNA, 29 bp, Gossypium hirsutum
tctaaagcgtttctgataactgaagaact

SEQ ID NO: 19781 - DNA, 35 bp, Gossypium hirsutum
aaagattggtgaggtagataaattcttaaatccaa

SEQ ID NO: 19782 - DNA, 21 bp, Gossypium hirsutum
acatcaactatagtgagaact

SEQ ID NO: 19783 - DNA, 21 bp, Gossypium hirsutum
acatcaactataatgagaact

SEQ ID NO: 19784 - DNA, 28 bp, Gossypium hirsutum
ggtacgagcattgcttgaatctatctta

SEQ ID NO: 19785 - DNA, 27 bp, Gossypium hirsutum
acttcatgttgatgtacatggaccaat

SEQ ID NO: 19786 - DNA, 23 bp, Gossypium hirsutum
ttgatcctattatctatttctac

SEQ ID NO: 19787 - DNA, 20 bp, Gossypium hirsutum
atcctattatccatttctac

SEQ ID NO: 19788 - DNA, 29 bp, Gossypium hirsutum
caccatggaggcaattatattaagagtca

SEQ ID NO: 19789 - DNA, 28 bp, Gossypium hirsutum
gcacattagggcttagtatctaaacaga

SEQ ID NO: 19790 - DNA, 17 bp, Gossypium hirsutum
caaagctcaattagtcc

SEQ ID NO: 19791 - DNA, 16 bp, Gossypium hirsutum
aaagctcaaatagtcc

SEQ ID NO: 19792 - DNA, 31 bp, Gossypium hirsutum
gtcagaactagaaaatgaaatgctagtcact

SEQ ID NO: 19793 - DNA, 27 bp, Gossypium hirsutum
ccagaaattgttcagctcactcttcta

SEQ ID NO: 19794 - DNA, 18 bp, Gossypium hirsutum
agatggagaagatattac

SEQ ID NO: 19795 - DNA, 16 bp, Gossypium hirsutum
atggagaagagattac

SEQ ID NO: 19796 - DNA, 26 bp, Gossypium hirsutum
gggtaatgatggtatcgagtgaaagt

SEQ ID NO: 19797 - DNA, 31 bp, Gossypium hirsutum
acagtacatctcattctgacataaaaaccaa

SEQ ID NO: 19798 - DNA, 21 bp, Gossypium hirsutum
ccttttgttaacattttcttt

SEQ ID NO: 19799 - DNA, 20 bp, Gossypium hirsutum
cttttgttaacatcttcttt

SEQ ID NO: 19800 - DNA, 29 bp, Gossypium hirsutum
ctatcatcagctttgatcatgcaaattga

SEQ ID NO: 19801 - DNA, 28 bp, Gossypium hirsutum
tcaggtttcttggtttaactgcttcata

SEQ ID NO: 19802 - DNA, 21 bp, Gossypium hirsutum
ctggttttagaaaatttttta

SEQ ID NO: 19803 - DNA, 20 bp, Gossypium hirsutum
tggttttagaaaaattttta

SEQ ID NO: 19804 - DNA, 25 bp, Gossypium hirsutum
cctagattttgagacctcacatggt

SEQ ID NO: 19805 - DNA, 20 bp, Gossypium hirsutum
ggcgtgtcacgtctatcaca

SEQ ID NO: 19806 - DNA, 21 bp, Gossypium hirsutum
aaaaactgatccttgtatgtc

SEQ ID NO: 19807 - DNA, 20 bp, Gossypium hirsutum
aaaactgatccttatatgtc

SEQ ID NO: 19808 - DNA, 32 bp, Gossypium hirsutum
tgccacctttaataaaaagttagtcctttaca

SEQ ID NO: 19809 - DNA, 27 bp, Gossypium hirsutum
ttgtcccccaagaatatatgttttgct

SEQ ID NO: 19810 - DNA, 18 bp, Gossypium hirsutum
aacagcttcttctttttt

SEQ ID NO: 19811 - DNA, 17 bp, Gossypium hirsutum
acagcttcttttttttt

SEQ ID NO: 19812 - DNA, 28 bp, Gossypium hirsutum
cgcatctgttcgagacaatatattttgg

SEQ ID NO: 19813 - DNA, 25 bp, Gossypium hirsutum
ccaaattcatgccaatgtgatggaa

SEQ ID NO: 19814 - DNA, 17 bp, Gossypium hirsutum
cttcctctacaacattc

SEQ ID NO: 19815 - DNA, 16 bp, Gossypium hirsutum
ttcctctacgacattc

SEQ ID NO: 19816 - DNA, 25 bp, Gossypium hirsutum
caaatgtagggcaagaaaaccaagt

SEQ ID NO: 19817 - DNA, 25 bp, Gossypium hirsutum
tgtgatgccatgatagaaagctcaa

SEQ ID NO: 19818 - DNA, 15 bp, Gossypium hirsutum
atggctggcatgtac

SEQ ID NO: 19819 - DNA, 18 bp, Gossypium hirsutum
tttatggctgacatgtac

SEQ ID NO: 19820 - DNA, 25 bp, Gossypium hirsutum
tgcatcctttgtttgctagcatttt

SEQ ID NO: 19821 - DNA, 25 bp, Gossypium hirsutum
acttggctaccactgtatctgtttt

SEQ ID NO: 19822 - DNA, 16 bp, Gossypium hirsutum
ctgcaaatccatatgc

SEQ ID NO: 19823 - DNA, 15 bp, Gossypium hirsutum
tgcaaacccatatgc

SEQ ID NO: 19824 - DNA, 25 bp, Gossypium hirsutum
ccctagctttcctttgatgaggttt

SEQ ID NO: 19825 - DNA, 24 bp, Gossypium hirsutum
gttgtgggattgatggtgttgaaa

SEQ ID NO: 19826 - DNA, 17 bp, Gossypium hirsutum
aagtaagtgagaatttt

SEQ ID NO: 19827 - DNA, 17 bp, Gossypium hirsutum
aagtaagtgaaaatttt

SEQ ID NO: 19828 - DNA, 45 bp, Gossypium hirsutum
gttagttagttaaacaaatagtctataaatgtaaacatactctgt

SEQ ID NO: 19829 - DNA, 22 bp, Gossypium hirsutum
caacatgcacgctaaggtatgc

SEQ ID NO: 19830 - DNA, 17 bp, Gossypium hirsutum
ttccaacgtgctgactt

SEQ ID NO: 19831 - DNA, 17 bp, Gossypium hirsutum
ttccaacgtgatgactt

SEQ ID NO: 19832 - DNA, 23 bp, Gossypium hirsutum
ctgtgcaatttcgctttcatgtg

SEQ ID NO: 19833 - DNA, 25 bp, Gossypium hirsutum
ggaaatcctgagagcaaaacaacat

SEQ ID NO: 19834 - DNA, 20 bp, Gossypium hirsutum
atttgcaagtcaacatgtaa

SEQ ID NO: 19835 - DNA, 20 bp, Gossypium hirsutum
atttgcaagtcaatatgtaa

SEQ ID NO: 19836 - DNA, 29 bp, Gossypium hirsutum
gtagggttcagaaacataaatcttcctgt

SEQ ID NO: 19837 - DNA, 43 bp, Gossypium hirsutum
ttttacttcattagttaactttctttcaaattatttctccatt

SEQ ID NO: 19838 - DNA, 17 bp, Gossypium hirsutum
aacgcaaaagctcaatt

SEQ ID NO: 19839 - DNA, 20 bp, Gossypium hirsutum
ttaaacgcaaaagttcaatt

SEQ ID NO: 19840 - DNA, 29 bp, Gossypium hirsutum
acattactcactgatctatgttctgcaaa

SEQ ID NO: 19841 - DNA, 29 bp, Gossypium hirsutum
gctgatcaacatcaacgtgaaatttactt

SEQ ID NO: 19842 - DNA, 21 bp, Gossypium hirsutum
agaaagtagaatttcaacatt

SEQ ID NO: 19843 - DNA, 19 bp, Gossypium hirsutum
aaagtagaagttcaacatt

SEQ ID NO: 19844 - DNA, 25 bp, Gossypium hirsutum
cccagaggaaaattgaagtgcaaaa

SEQ ID NO: 19845 - DNA, 29 bp, Gossypium hirsutum
tgcccttaaattgtcaagatagtgttctt

SEQ ID NO: 19846 - DNA, 20 bp, Gossypium hirsutum
attactttgtaataaaatgc

SEQ ID NO: 19847 - DNA, 20 bp, Gossypium hirsutum
attactttgttataaaatgc

SEQ ID NO: 19848 - DNA, 30 bp, Gossypium hirsutum
tgaatcaggaatgttttaaagtagccttgt

SEQ ID NO: 19849 - DNA, 44 bp, Gossypium hirsutum
gacaaaatgcaattttatcattatatcaatttaggagttaaatg

SEQ ID NO: 19850 - DNA, 15 bp, Gossypium hirsutum
ccgctaagcaagaca

SEQ ID NO: 19851 - DNA, 15 bp, Gossypium hirsutum
ccgctaaacaagaca

SEQ ID NO: 19852 - DNA, 18 bp, Gossypium hirsutum
ccagcccggaagttgaca

SEQ ID NO: 19853 - DNA, 21 bp, Gossypium hirsutum
tccaggatttaacggcaagca

SEQ ID NO: 19854 - DNA, 20 bp, Gossypium hirsutum
ctcatgtctatttgtccgcc

SEQ ID NO: 19855 - DNA, 18 bp, Gossypium hirsutum
catgtctattagtccgcc

SEQ ID NO: 19856 - DNA, 34 bp, Gossypium hirsutum
caaccaatttgaattgatgttaaattatgcatgt

SEQ ID NO: 19857 - DNA, 26 bp, Gossypium hirsutum
gtgagaggcatagatggacattttca

SEQ ID NO: 19858 - DNA, 18 bp, Gossypium hirsutum
ctatgcctaactaaatac

SEQ ID NO: 19859 - DNA, 18 bp, Gossypium hirsutum
ctatgcctaaataaatac

SEQ ID NO: 19860 - DNA, 21 bp, Gossypium hirsutum
cagctcaccaaagcaaatgct

SEQ ID NO: 19861 - DNA, 37 bp, Gossypium hirsutum
caaagaaaaacaatcctaccaataattaaaaaatgga

SEQ ID NO: 19862 - DNA, 17 bp, Gossypium hirsutum
aaaggcagaaatgaaat

SEQ ID NO: 19863 - DNA, 17 bp, Gossypium hirsutum
aaaggcagaagtgaaat

SEQ ID NO: 19864 - DNA, 26 bp, Gossypium hirsutum
tccaaaacttatggacttggtccttt

SEQ ID NO: 19865 - DNA, 28 bp, Gossypium hirsutum
ctggttgaataattaggagatgctcaga

SEQ ID NO: 19866 - DNA, 21 bp, Gossypium hirsutum
tttgtagaaaaaaaaattatg

SEQ ID NO: 19867 - DNA, 20 bp, Gossypium hirsutum
tttgtagaaaaaaaattatg

SEQ ID NO: 19868 - DNA, 26 bp, Gossypium hirsutum
actgtcaaatgtaactgcgaactact

SEQ ID NO: 19869 - DNA, 24 bp, Gossypium hirsutum
gtgcgagtgagagcaaatattcag

SEQ ID NO: 19870 - DNA, 15 bp, Gossypium hirsutum
tcacatgcgctcatg

SEQ ID NO: 19871 - DNA, 15 bp, Gossypium hirsutum
tcacatgcactcatg

SEQ ID NO: 19872 - DNA, 25 bp, Gossypium hirsutum
cgtcgaccagttttgtgcgattata

SEQ ID NO: 19873 - DNA, 33 bp, Gossypium hirsutum
ggtcattgacatgtttagactttattacttggt

SEQ ID NO: 19874 - DNA, 17 bp, Gossypium hirsutum
ccaattcttcccccccc

SEQ ID NO: 19875 - DNA, 17 bp, Gossypium hirsutum
ccaattctttccccccc

SEQ ID NO: 19876 - DNA, 33 bp, Gossypium hirsutum
acaaagttatccaccttaataaagagataggga

SEQ ID NO: 19877 - DNA, 27 bp, Gossypium hirsutum
ggcattgagtgaaacattggtttagat

SEQ ID NO: 19878 - DNA, 24 bp, Gossypium hirsutum
tgaatattgtgtaacttttatttt

SEQ ID NO: 19879 - DNA, 22 bp, Gossypium hirsutum
aatattgtgtaactcttatttt

SEQ ID NO: 19880 - DNA, 40 bp, Gossypium hirsutum
ctgctattttccaactgttttgctactattttattattat

SEQ ID NO: 19881 - DNA, 27 bp, Gossypium hirsutum
cctcacacttatctctttttccccttt

SEQ ID NO: 19882 - DNA, 14 bp, Gossypium hirsutum
cctcccaaggttgc

SEQ ID NO: 19883 - DNA, 15 bp, Gossypium hirsutum
tcctccctaggttgc

SEQ ID NO: 19884 - DNA, 35 bp, Gossypium hirsutum
gaagtttgttattaggctgcaagatttgtaaatat

SEQ ID NO: 19885 - DNA, 26 bp, Gossypium hirsutum
actgcatttgagttgagacttaagca

SEQ ID NO: 19886 - DNA, 13 bp, Gossypium hirsutum
acacccgaagatc

SEQ ID NO: 19887 - DNA, 15 bp, Gossypium hirsutum
tgacaccctaagatc

SEQ ID NO: 19888 - DNA, 25 bp, Gossypium hirsutum
gatccaaaccctcgaaagacatact

SEQ ID NO: 19889 - DNA, 32 bp, Gossypium hirsutum
ccctcaattatgacctcaaatctgaaaatatg

SEQ ID NO: 19890 - DNA, 20 bp, Gossypium hirsutum
atcaaattgtacgtgagttt

SEQ ID NO: 19891 - DNA, 21 bp, Gossypium hirsutum
aatcaaattgtacctgagttt

SEQ ID NO: 19892 - DNA, 32 bp, Gossypium hirsutum
tgggtcattttaaattacaatcatttgggttt

SEQ ID NO: 19893 - DNA, 24 bp, Gossypium hirsutum
gtgttgtaagggcattagcaaagt

SEQ ID NO: 19894 - DNA, 15 bp, Gossypium hirsutum
catctccgaactcag

SEQ ID NO: 19895 - DNA, 15 bp, Gossypium hirsutum
catctccggactcag

SEQ ID NO: 19896 - DNA, 24 bp, Gossypium hirsutum
tgctgaaactgataaggcaacact

SEQ ID NO: 19897 - DNA, 21 bp, Gossypium hirsutum
ccattggaccgctctctacag

SEQ ID NO: 19898 - DNA, 16 bp, Gossypium hirsutum
tttggagttggatctt

SEQ ID NO: 19899 - DNA, 16 bp, Gossypium hirsutum
tttggagttgggtctt

SEQ ID NO: 19900 - DNA, 25 bp, Gossypium hirsutum
gcaaggttgtaagaaggatctagga

SEQ ID NO: 19901 - DNA, 20 bp, Gossypium hirsutum
gttgtaacttgcggtgtgca

SEQ ID NO: 19902 - DNA, 17 bp, Gossypium hirsutum
tttgcagcaatagaaat

SEQ ID NO: 19903 - DNA, 16 bp, Gossypium hirsutum
ttgcagcaattgaaat

SEQ ID NO: 19904 - DNA, 25 bp, Gossypium hirsutum
ccatggaagaacaatgagcaaaaca

SEQ ID NO: 19905 - DNA, 25 bp, Gossypium hirsutum
tccttgctaccttcttgccctatat

SEQ ID NO: 19906 - DNA, 17 bp, Gossypium hirsutum
ctctattccctaatttc

SEQ ID NO: 19907 - DNA, 15 bp, Gossypium hirsutum
ctattccccaatttc

SEQ ID NO: 19908 - DNA, 27 bp, Gossypium hirsutum
aatatgatacaaagggagaagccactc

SEQ ID NO: 19909 - DNA, 25 bp, Gossypium hirsutum
gacgaccctcggttttctttatttt

SEQ ID NO: 19910 - DNA, 15 bp, Gossypium hirsutum
atggttgccattagc

SEQ ID NO: 19911 - DNA, 15 bp, Gossypium hirsutum
atggttgccgttagc

SEQ ID NO: 19912 - DNA, 24 bp, Gossypium hirsutum
tcgggagatttgaaccaaatgagg

SEQ ID NO: 19913 - DNA, 25 bp, Gossypium hirsutum
cagctgagaacatgcatcttttgaa

SEQ ID NO: 19914 - DNA, 25 bp, Gossypium hirsutum
tagtttgtttcatttataaatacta

SEQ ID NO: 19915 - DNA, 22 bp, Gossypium hirsutum
tttgtttcatttatcaatacta

SEQ ID NO: 19916 - DNA, 27 bp, Gossypium hirsutum
tggaacatgtactagctggaaaacttg

SEQ ID NO: 19917 - DNA, 25 bp, Gossypium hirsutum
tctgcttgcttggataatggaagtt

SEQ ID NO: 19918 - DNA, 20 bp, Gossypium hirsutum
caggaatcaaataagaatat

SEQ ID NO: 19919 - DNA, 20 bp, Gossypium hirsutum
caggaatcaaataagcatat

SEQ ID NO: 19920 - DNA, 22 bp, Gossypium hirsutum
cccgactccccatagtagtagt

SEQ ID NO: 19921 - DNA, 31 bp, Gossypium hirsutum
agattaacaaacctaatgccactttacatca

SEQ ID NO: 19922 - DNA, 19 bp, Gossypium hirsutum
catgaatattcaagaacat

SEQ ID NO: 19923 - DNA, 19 bp, Gossypium hirsutum
catgaatattcaggaacat

SEQ ID NO: 19924 - DNA, 27 bp, Gossypium hirsutum
cggtatgataaaatcttcgtctgcttt

SEQ ID NO: 19925 - DNA, 25 bp, Gossypium hirsutum
ccaccagtgatgaagctactattct

SEQ ID NO: 19926 - DNA, 19 bp, Gossypium hirsutum
tcatcaacagttgtttaat

SEQ ID NO: 19927 - DNA, 18 bp, Gossypium hirsutum
catcaacagtagtttaat

SEQ ID NO: 19928 - DNA, 33 bp, Gossypium hirsutum
gtattttaacacaagaagacaaatcattcctca

SEQ ID NO: 19929 - DNA, 20 bp, Gossypium hirsutum
gttctattcgcccccaccta

SEQ ID NO: 19930 - DNA, 18 bp, Gossypium hirsutum
cttttacacgccataata

SEQ ID NO: 19931 - DNA, 20 bp, Gossypium hirsutum
ctcttttacacaccataata

SEQ ID NO: 19932 - DNA, 26 bp, Gossypium hirsutum
aacgtagacagtcattgagcttcatt

SEQ ID NO: 19933 - DNA, 25 bp, Gossypium hirsutum
caccggtgtttccatatgttaaggt

SEQ ID NO: 19934 - DNA, 20 bp, Gossypium hirsutum
ttacattgttcaggtagtcg

SEQ ID NO: 19935 - DNA, 16 bp, Gossypium hirsutum
attgttcgggtagtcg

SEQ ID NO: 19936 - DNA, 30 bp, Gossypium hirsutum
ctttagaacataaattgccgtatccatagc

SEQ ID NO: 19937 - DNA, 27 bp, Gossypium hirsutum
ttgtttcttatgtttcagcctggtact

SEQ ID NO: 19938 - DNA, 19 bp, Gossypium hirsutum
ccacagtttatgtggagag

SEQ ID NO: 19939 - DNA, 20 bp, Gossypium hirsutum
cccacagtttatatggagag

SEQ ID NO: 19940 - DNA, 25 bp, Gossypium hirsutum
gcatttccagcaacatctacttctc

SEQ ID NO: 19941 - DNA, 24 bp, Gossypium hirsutum
ggctttggatcgacatgaatgaag

SEQ ID NO: 19942 - DNA, 15 bp, Gossypium hirsutum
aagtgcaagataccg

SEQ ID NO: 19943 - DNA, 15 bp, Gossypium hirsutum
aagtgcacgataccg

SEQ ID NO: 19944 - DNA, 17 bp, Gossypium hirsutum
ccactcgggcactgctt

SEQ ID NO: 19945 - DNA, 22 bp, Gossypium hirsutum
tgcaccgcaaacatggaatttt

SEQ ID NO: 19946 - DNA, 18 bp, Gossypium hirsutum
aatacgagtcagtcagca

SEQ ID NO: 19947 - DNA, 17 bp, Gossypium hirsutum
atacgagtcggtcagca

SEQ ID NO: 19948 - DNA, 25 bp, Gossypium hirsutum
aagagaaaaggttccaagacaccaa

SEQ ID NO: 19949 - DNA, 21 bp, Gossypium hirsutum
gctgagctagtgcatctccaa

SEQ ID NO: 19950 - DNA, 16 bp, Gossypium hirsutum
ctcaatacgcgccttg

SEQ ID NO: 19951 - DNA, 17 bp, Gossypium hirsutum
cctcaatacacgccttg

SEQ ID NO: 19952 - DNA, 21 bp, Gossypium hirsutum
ggtgcaaggctatcagcagat

SEQ ID NO: 19953 - DNA, 21 bp, Gossypium hirsutum
cgggatgaaatggcagacaag

SEQ ID NO: 19954 - DNA, 23 bp, Gossypium hirsutum
cattcatttacaatatatatttt

SEQ ID NO: 19955 - DNA, 22 bp, Gossypium hirsutum
attcatttacaatatatttttt

SEQ ID NO: 19956 - DNA, 34 bp, Gossypium hirsutum
aacagacttctatggttgcaatatgtctatttaa

SEQ ID NO: 19957 - DNA, 20 bp, Gossypium hirsutum
cgccaacgttaatgcaagca

SEQ ID NO: 19958 - DNA, 21 bp, Gossypium hirsutum
tcaaattatgaataagaaaac

SEQ ID NO: 19959 - DNA, 20 bp, Gossypium hirsutum
caaattatgaattagaaaac

SEQ ID NO: 19960 - DNA, 27 bp, Gossypium hirsutum
agctctctggaaattattgaacagcaa

SEQ ID NO: 19961 - DNA, 25 bp, Gossypium hirsutum
aatcagcttcaacttctccgaactt

SEQ ID NO: 19962 - DNA, 13 bp, Gossypium hirsutum
ctgctcaaagctg

SEQ ID NO: 19963 - DNA, 14 bp, Gossypium hirsutum
actgctcgaagctg

SEQ ID NO: 19964 - DNA, 20 bp, Gossypium hirsutum
agcgttgtgggtaacttggt

SEQ ID NO: 19965 - DNA, 24 bp, Gossypium hirsutum
agttctgttcgtgtgttcgagatt

SEQ ID NO: 19966 - DNA, 17 bp, Gossypium hirsutum
aaaactccggtgagaaa

SEQ ID NO: 19967 - DNA, 18 bp, Gossypium hirsutum
caaaactccagtgagaaa

SEQ ID NO: 19968 - DNA, 44 bp, Gossypium hirsutum
gtaacagtgagattaaagttaattgtagaatatgtatttgaatt

SEQ ID NO: 19969 - DNA, 39 bp, Gossypium hirsutum; identical to SEQ ID NO: 17377

SEQ ID NO: 19970 - DNA, 24 bp, Gossypium hirsutum
cgattaatacaataaatcaatatt

SEQ ID NO: 19971 - DNA, 24 bp, Gossypium hirsutum
cgattaatacaataaattaatatt

SEQ ID NO: 19972 - DNA, 25 bp, Gossypium hirsutum
aggatcttctcctcctcatgatcaa

SEQ ID NO: 19973 - DNA, 27 bp, Gossypium hirsutum
aatcattgcatgcacatcagttacttg

SEQ ID NO: 19974 - DNA, 23 bp, Gossypium hirsutum
tcaattcattttaacacttattt

SEQ ID NO: 19975 - DNA, 22 bp, Gossypium hirsutum
caattcattttaacatttattt

SEQ ID NO: 19976 - DNA, 28 bp, Gossypium hirsutum
gcagaagtcaacacataacaccattatt

SEQ ID NO: 19977 - DNA, 22 bp, Gossypium hirsutum
gcaaccttctgatctggagtca

SEQ ID NO: 19978 - DNA, 18 bp, Gossypium hirsutum
actagctctgaatcaaaa

SEQ ID NO: 19979 - DNA, 18 bp, Gossypium hirsutum
actagctctgattcaaaa

SEQ ID NO: 19980 - DNA, 29 bp, Gossypium hirsutum
gctgttaaagaaaatacctcatggagtct

SEQ ID NO: 19981 - DNA, 34 bp, Gossypium hirsutum
tcagcagagccataataaataataatacaagtgt

SEQ ID NO: 19982 - DNA, 18 bp, Gossypium hirsutum
cacaaaagttgtaagaaa

SEQ ID NO: 19983 - DNA, 19 bp, Gossypium hirsutum
ccacaaaagttataagaaa

SEQ ID NO: 19984 - DNA, 20 bp, Gossypium hirsutum
tcagatcccaccccatttgc

SEQ ID NO: 19985 - DNA, 27 bp, Gossypium hirsutum
cataaccagaacatttcgtgaacagtt

SEQ ID NO: 19986 - DNA, 18 bp, Gossypium hirsutum
cccaagagaagaagagtt

SEQ ID NO: 19987 - DNA, 17 bp, Gossypium hirsutum
ccaagagaacaagagtt

SEQ ID NO: 19988 - DNA, 45 bp, Gossypium hirsutum
ccatgggtttttatttactattttactaatgtttgatttttattt

SEQ ID NO: 19989 - DNA, 29 bp, Gossypium hirsutum
gctgactttaatggtcttaatctgcaatg

SEQ ID NO: 19990 - DNA, 21 bp, Gossypium hirsutum
attatcaggattcagtaagtc

SEQ ID NO: 19991 - DNA, 17 bp, Gossypium hirsutum
tcaggattcaataagtc

SEQ ID NO: 19992 - DNA, 31 bp, Gossypium hirsutum
ggttgataactgttatttctcttagcctagt

SEQ ID NO: 19993 - DNA, 31 bp, Gossypium hirsutum
tgttagagcacataaatttgaaaccgaaaaa

SEQ ID NO: 19994 - DNA, 26 bp, Gossypium hirsutum
ttttttttgaaagatataatcttttt

SEQ ID NO: 19995 - DNA, 22 bp, Gossypium hirsutum
tttttgaaagatataatttttt

SEQ ID NO: 19996 - DNA, 25 bp, Gossypium hirsutum
ccctttgttccctgtcaattttgaa

SEQ ID NO: 19997 - DNA, 25 bp, Gossypium hirsutum
gtctccataagtagatgcccctaga

SEQ ID NO: 19998 - DNA, 22 bp, Gossypium hirsutum
aatagttagacatgtatatgca

SEQ ID NO: 19999 - DNA, 17 bp, Gossypium hirsutum
ttagacatgcatatgca

SEQ ID NO: 20000 - DNA, 32 bp, Gossypium hirsutum
tcatagcagaaatattgaagtgaaggaaagaa

SEQ ID NO: 20001 - DNA, 26 bp, Gossypium hirsutum
tttctagacctggcaatacatgacac

SEQ ID NO: 20002 - DNA, 18 bp, Gossypium hirsutum
agatgcatgaatgtctca

SEQ ID NO: 20003 - DNA, 16 bp, Gossypium hirsutum
atgcatgaatgtttca

SEQ ID NO: 20004 - DNA, 38 bp, Gossypium hirsutum
cctgttttaaggtattttatatttgtatgaattgtggt

SEQ ID NO: 20005 - DNA, 25 bp, Gossypium hirsutum
accttgtttgacacacgtctttcta

SEQ ID NO: 20006 - DNA, 16 bp, Gossypium hirsutum
ttcatcaacaattgct

SEQ ID NO: 20007 - DNA, 16 bp, Gossypium hirsutum
ttcatcaacgattgct

SEQ ID NO: 20008 - DNA, 32 bp, Gossypium hirsutum
actgtttatcacaagagaagtgtgttaacata

SEQ ID NO: 20009 - DNA, 29 bp, Gossypium hirsutum
ccaaatatgctactcaattaccaggatga

SEQ ID NO: 20010 - DNA, 25 bp, Gossypium hirsutum
agtgtaaaaattttattgagtactt

SEQ ID NO: 20011 - DNA, 23 bp, Gossypium hirsutum
tgtaaaaattttattgagtattt

SEQ ID NO: 20012 - DNA, 36 bp, Gossypium hirsutum
cagttaaatgacttttttgatacatttttgacagtt

SEQ ID NO: 20013 - DNA, 35 bp, Gossypium hirsutum
cggtcatctaattatcatttttcttattttggtca

SEQ ID NO: 20014 - DNA, 18 bp, Gossypium hirsutum
atttttttgtccattttc

SEQ ID NO: 20015 - DNA, 17 bp, Gossypium hirsutum
attttttgtccattttc

SEQ ID NO: 20016 - DNA, 23 bp, Gossypium hirsutum
gtcatgcatccacccgttaaatt

SEQ ID NO: 20017 - DNA, 26 bp, Gossypium hirsutum
ccagcattatcgggatgaataacaac

SEQ ID NO: 20018 - DNA, 17 bp, Gossypium hirsutum
cattggatgggagttta

SEQ ID NO: 20019 - DNA, 16 bp, Gossypium hirsutum
attggatggcagttta

SEQ ID NO: 20020 - DNA, 25 bp, Gossypium hirsutum
tcggtaacaatgtaatctcgagcaa

SEQ ID NO: 20021 - DNA, 22 bp, Gossypium hirsutum
ccgagtgaagtaggcatatcga

SEQ ID NO: 20022 - DNA, 19 bp, Gossypium hirsutum
caactcatttccattaatt

SEQ ID NO: 20023 - DNA, 18 bp, Gossypium hirsutum
aactcatttccgttaatt

SEQ ID NO: 20024 - DNA, 22 bp, Gossypium hirsutum
tttgctcatggtaaccggacaa

SEQ ID NO: 20025 - DNA, 35 bp, Gossypium hirsutum
cattagatttatgtcagagaaagaaaaccattgaa

SEQ ID NO: 20026 - DNA, 15 bp, Gossypium hirsutum
ttgaaggcaaaagtt

SEQ ID NO: 20027 - DNA, 14 bp, Gossypium hirsutum
tgaaggcagaagtt

SEQ ID NO: 20028 - DNA, 30 bp, Gossypium hirsutum
ggttgacttctttaaactgcttcattttca

SEQ ID NO: 20029 - DNA, 32 bp, Gossypium hirsutum
tgttactttagtttgaatcacccgatatacac

SEQ ID NO: 20030 - DNA, 21 bp, Gossypium hirsutum
atatggattatttcagaatat

SEQ ID NO: 20031 - DNA, 21 bp, Gossypium hirsutum
atatggattatttcggaatat

SEQ ID NO: 20032 - DNA, 33 bp, Gossypium hirsutum
ccatgtctaaggattgctacttaagtttagtta

SEQ ID NO: 20033 - DNA, 33 bp, Gossypium hirsutum
aaaatcgaatcttcataaaacaatttctgggaa

SEQ ID NO: 20034 - DNA, 18 bp, Gossypium hirsutum
aatagatccgcgctgaca

SEQ ID NO: 20035 - DNA, 18 bp, Gossypium hirsutum
aatagatccgcactgaca

SEQ ID NO: 20036 - DNA, 29 bp, Gossypium hirsutum
aagaacaaaaagaattttcatacccgctt

SEQ ID NO: 20037 - DNA, 23 bp, Gossypium hirsutum
ctggccatcaaagtattgttgca

SEQ ID NO: 20038 - DNA, 21 bp, Gossypium hirsutum
attatgagtatgaagatgatc

SEQ ID NO: 20039 - DNA, 20 bp, Gossypium hirsutum
ttatgagtatgaaaatgatc

SEQ ID NO: 20040 - DNA, 27 bp, Gossypium hirsutum
ccaaggttgaaacccagataatgatga

SEQ ID NO: 20041 - DNA, 28 bp, Gossypium hirsutum
ccttatctggtactcatttctgaatccg

SEQ ID NO: 20042 - DNA, 26 bp, Gossypium hirsutum
aaaattttgatcatatacttcaattt

SEQ ID NO: 20043 - DNA, 22 bp, Gossypium hirsutum
ttttgatcatatacttgaattt

SEQ ID NO: 20044 - DNA, 31 bp, Gossypium hirsutum
caagcaattcatggcattatatttgaagaca

SEQ ID NO: 20045 - DNA, 25 bp, Gossypium hirsutum
agaaagcaagggaaggaaatcactt

SEQ ID NO: 20046 - DNA, 19 bp, Gossypium hirsutum
cctttagagtttgagtttc

SEQ ID NO: 20047 - DNA, 18 bp, Gossypium hirsutum
ctttagagttcgagtttc

SEQ ID NO: 20048 - DNA, 23 bp, Gossypium hirsutum
ccctctcgaacttttctgggatt

SEQ ID NO: 20049 - DNA, 25 bp, Gossypium hirsutum
ggcaaaaagcaatctgactcttagt

SEQ ID NO: 20050 - DNA, 15 bp, Gossypium hirsutum
atggagggcctttgt

SEQ ID NO: 20051 - DNA, 15 bp, Gossypium hirsutum
atggaggccctttgt

SEQ ID NO: 20052 - DNA, 35 bp, Gossypium hirsutum
tcagagcatatatacattctgtattaggtaaaggt

SEQ ID NO: 20053 - DNA, 19 bp, Gossypium hirsutum
cctgtgccgtttgggagta

SEQ ID NO: 20054 - DNA, 17 bp, Gossypium hirsutum
cctaccacttggagacc

SEQ ID NO: 20055 - DNA, 18 bp, Gossypium hirsutum
tcctaccactttgagacc

SEQ ID NO: 20056 - DNA, 26 bp, Gossypium hirsutum
tgtatcaaaacggtgagctaattgct

SEQ ID NO: 20057 - DNA, 32 bp, Gossypium hirsutum
tgtaaatattgggttttaaaccagagctcata

SEQ ID NO: 20058 - DNA, 17 bp, Gossypium hirsutum
catattgccaagaacac

SEQ ID NO: 20059 - DNA, 16 bp, Gossypium hirsutum
atattgccaagaatac

SEQ ID NO: 20060 - DNA, 23 bp, Gossypium hirsutum
tggcttgcagttatctgggattt

SEQ ID NO: 20061 - DNA, 32 bp, Gossypium hirsutum
cagcaaatatgccatagagatttgaaattaga

SEQ ID NO: 20062 - DNA, 17 bp, Gossypium hirsutum
aagccctacacctcgtt

SEQ ID NO: 20063 - DNA, 14 bp, Gossypium hirsutum
ccctgcacctcgtt

SEQ ID NO: 20064 - DNA, 30 bp, Gossypium hirsutum
attcccaaacaataaccgaaatcacaaatt

SEQ ID NO: 20065 - DNA, 41 bp, Gossypium hirsutum
ccactgtaatttaaataagattgaattatcgttttggtatt

SEQ ID NO: 20066 - DNA, 20 bp, Gossypium hirsutum
aaagataaaagctcaaacac

SEQ ID NO: 20067 - DNA, 21 bp, Gossypium hirsutum
aaaagataaaaactcaaacac

SEQ ID NO: 20068 - DNA, 39 bp, Gossypium hirsutum
ggtgtgttctactaaaataaatgagatttagtttgaaaa

SEQ ID NO: 20069 - DNA, 25 bp, Gossypium hirsutum
gaccacagccatcttacttaatggt

SEQ ID NO: 20070 - DNA, 18 bp, Gossypium hirsutum
ccttgacaactatttcta

SEQ ID NO: 20071 - DNA, 17 bp, Gossypium hirsutum
cttgacaactgtttcta

SEQ ID NO: 20072 - DNA, 24 bp, Gossypium hirsutum
gtaggctttcctggacattatggt

SEQ ID NO: 20073 - DNA, 28 bp, Gossypium hirsutum
gacacaattattgtgatttgggattgga

SEQ ID NO: 20074 - DNA, 16 bp, Gossypium hirsutum
caccagttggctactg

SEQ ID NO: 20075 - DNA, 15 bp, Gossypium hirsutum
accagttggccactg

SEQ ID NO: 20076 - DNA, 25 bp, Gossypium hirsutum
gccaaaaggagacaagttgaagaac

SEQ ID NO: 20077 - DNA, 25 bp, Gossypium hirsutum
tggcgcatcatctcgatatattgag

SEQ ID NO: 20078 - DNA, 14 bp, Gossypium hirsutum
actccggagcaacc

SEQ ID NO: 20079 - DNA, 16 bp, Gossypium hirsutum
ttactccagagcaacc

SEQ ID NO: 20080 - DNA, 22 bp, Gossypium hirsutum
tcagtggcagaacttgctatgg

SEQ ID NO: 20081 - DNA, 33 bp, Gossypium hirsutum
atcagtctacaaaactaaaattttgagcacatt

SEQ ID NO: 20082 - DNA, 15 bp, Gossypium hirsutum
atcatgccataattg

SEQ ID NO: 20083 - DNA, 16 bp, Gossypium hirsutum
catcatgccttaattg

SEQ ID NO: 20084 - DNA, 21 bp, Gossypium hirsutum
gcaaaaccctgcaacaaggat

SEQ ID NO: 20085 - DNA, 47 bp, Gossypium hirsutum
gctactcttaccatatattttaattatttgcttcattctatttattt

SEQ ID NO: 20086 - DNA, 25 bp, Gossypium hirsutum
tcatttaaaattttgattaaattga

SEQ ID NO: 20087 - DNA, 22 bp, Gossypium hirsutum
tttaaaattttgattgaattga

SEQ ID NO: 20088 - DNA, 45 bp, Gossypium hirsutum
gcttaacaaaaatgatatattaattatttttccaactgaattcat

SEQ ID NO: 20089 - DNA, 24 bp, Gossypium hirsutum
gcagaccaggaagaggatcaaatc

SEQ ID NO: 20090 - DNA, 16 bp, Gossypium hirsutum
cggcaacttacaacat

SEQ ID NO: 20091 - DNA, 16 bp, Gossypium hirsutum
cggcaacttacgacat

SEQ ID NO: 20092 - DNA, 29 bp, Gossypium hirsutum
cttttgcaaataaattacctgcttttcca

SEQ ID NO: 20093 - DNA, 25 bp, Gossypium hirsutum
cacctgtcatttgacactcatgtct

SEQ ID NO: 20094 - DNA, 15 bp, Gossypium hirsutum
accacggaacactta

SEQ ID NO: 20095 - DNA, 14 bp, Gossypium hirsutum
ccacggagcactta

SEQ ID NO: 20096 - DNA, 25 bp, Gossypium hirsutum
gcactgctattgtaggttgattgtt

SEQ ID NO: 20097 - DNA, 29 bp, Gossypium hirsutum
gagaggaaagaaaataagagggatgaaca

SEQ ID NO: 20098 - DNA, 20 bp, Gossypium hirsutum
taatgcataaaaaccaatcc

SEQ ID NO: 20099 - DNA, 18 bp, Gossypium hirsutum
atgcataaaacccaatcc

SEQ ID NO: 20100 - DNA, 32 bp, Gossypium hirsutum
gctttctcattttctctcatctcatatttcca

SEQ ID NO: 20101 - DNA, 38 bp, Gossypium hirsutum
caatggaagactattgattaacatttattccaaagaaa

SEQ ID NO: 20102 - DNA, 21 bp, Gossypium hirsutum
ctggctttatttttatgaatg

SEQ ID NO: 20103 - DNA, 20 bp, Gossypium hirsutum
tggctttatttttaggaatg

SEQ ID NO: 20104 - DNA, 25 bp, Gossypium hirsutum
cagtttgacacctattaaccatgca

SEQ ID NO: 20105 - DNA, 47 bp, Gossypium hirsutum
acttaattattagagaaggaaacttagaaataaaggtattcataaaa

SEQ ID NO: 20106 - DNA, 16 bp, Gossypium hirsutum
ctgtagccacggttaa

SEQ ID NO: 20107 - DNA, 16 bp, Gossypium hirsutum
ctgtagccacagttaa

SEQ ID NO: 20108 - DNA, 26 bp, Gossypium hirsutum
cttttcttttcctgcccaattttgga

SEQ ID NO: 20109 - DNA, 26 bp, Gossypium hirsutum
agtggtgaagttccagatcttttgtt

SEQ ID NO: 20110 - DNA, 25 bp, Gossypium hirsutum
attgaaataacactttctatatgat

SEQ ID NO: 20111 - DNA, 24 bp, Gossypium hirsutum
ttgaaataacactttttatatgat

SEQ ID NO: 20112 - DNA, 29 bp, Gossypium hirsutum
tctggtgtgtaaaggatgtagtaaaaaca

SEQ ID NO: 20113 - DNA, 27 bp, Gossypium hirsutum
tcagattccctttattgcgatgtatcg

SEQ ID NO: 20114 - DNA, 16 bp, Gossypium hirsutum
caaggagcagtgccta

SEQ ID NO: 20115 - DNA, 16 bp, Gossypium hirsutum
caaggagctgtgccta

SEQ ID NO: 20116 - DNA, 21 bp, Gossypium hirsutum
ctcaggatcttgcagcagact

SEQ ID NO: 20117 - DNA, 18 bp, Gossypium hirsutum
ggccggaggtttgctttc

SEQ ID NO: 20118 - DNA, 19 bp, Gossypium hirsutum
ttctgtcttttcataatca

SEQ ID NO: 20119 - DNA, 17 bp, Gossypium hirsutum
ctgtcttttcagaatca

SEQ ID NO: 20120 - DNA, 25 bp, Gossypium hirsutum
ctacatccccctctttgttctcttc

SEQ ID NO: 20121 - DNA, 27 bp, Gossypium hirsutum
tcactcaactttcaattcggtcactat

SEQ ID NO: 20122 - DNA, 16 bp, Gossypium hirsutum
tgacacgttggtgatc

SEQ ID NO: 20123 - DNA, 17 bp, Gossypium hirsutum
atgacacgttagtgatc

SEQ ID NO: 20124 - DNA, 21 bp, Gossypium hirsutum
ccttctgctcctcatgtccaa

SEQ ID NO: 20125 - DNA, 44 bp, Gossypium hirsutum
aggattattgggaaatcattttagattaaatcttttattgaaat

SEQ ID NO: 20126 - DNA, 17 bp, Gossypium hirsutum
ttgccatttgtatttta

SEQ ID NO: 20127 - DNA, 17 bp, Gossypium hirsutum
ttgccatttgtgtttta

SEQ ID NO: 20128 - DNA, 29 bp, Gossypium hirsutum
cctaccatgttgaaaagaaatcaccctat

SEQ ID NO: 20129 - DNA, 28 bp, Gossypium hirsutum
gttgcttgtgggatcaacaattaaaagt

SEQ ID NO: 20130 - DNA, 24 bp, Gossypium hirsutum
cacaagagataaaactctcataaa

SEQ ID NO: 20131 - DNA, 22 bp, Gossypium hirsutum
caagagataaaactcccataaa

SEQ ID NO: 20132 - DNA, 21 bp, Gossypium hirsutum
gggcttctcctaatggcacat

SEQ ID NO: 20133 - DNA, 29 bp, Gossypium hirsutum
gagcatttcttgttatcaggttggttaaa

SEQ ID NO: 20134 - DNA, 20 bp, Gossypium hirsutum
aatcatttctctgttttagc

SEQ ID NO: 20135 - DNA, 20 bp, Gossypium hirsutum
aatcatttctctattttagc

SEQ ID NO: 20136 - DNA, 26 bp, Gossypium hirsutum
ggtgtctaacagtgatggagtaatcc

SEQ ID NO: 20137 - DNA, 25 bp, Gossypium hirsutum
gggcgaactatcaacccttcaataa

SEQ ID NO: 20138 - DNA, 19 bp, Gossypium hirsutum
ccttactgtatctggcacc

SEQ ID NO: 20139 - DNA, 19 bp, Gossypium hirsutum
ccttactgtttctggcacc

SEQ ID NO: 20140 - DNA, 23 bp, Gossypium hirsutum
acatcacgtactctgcgtaaacg

SEQ ID NO: 20141 - DNA, 29 bp, Gossypium hirsutum
aacttcgatgattaccatcatagggtttt

SEQ ID NO: 20142 - DNA, 20 bp, Gossypium hirsutum
attagtatcgcctgatatat

SEQ ID NO: 20143 - DNA, 21 bp, Gossypium hirsutum
cattagtatcgccttatatat

SEQ ID NO: 20144 - DNA, 25 bp, Gossypium hirsutum
cgtctgatatagtggcgacacaaaa

SEQ ID NO: 20145 - DNA, 37 bp, Gossypium hirsutum
gtagtcaataacttttaagtttcaccattcaattcaa

SEQ ID NO: 20146 - DNA, 22 bp, Gossypium hirsutum
attatcaattacagtaaaataa

SEQ ID NO: 20147 - DNA, 21 bp, Gossypium hirsutum
ttatcaattacactaaaataa

SEQ ID NO: 20148 - DNA, 25 bp, Gossypium hirsutum
cacgagtacaatggagctatggtaa

SEQ ID NO: 20149 - DNA, 45 bp, Gossypium hirsutum
caaaaattaaatattaaagtaaattacaaccaagatcactgaatt

SEQ ID NO: 20150 - DNA, 25 bp, Gossypium hirsutum
ctattcaaaagtttttttatttaag

SEQ ID NO: 20151 - DNA, 23 bp, Gossypium hirsutum
tattcaaaagttttttatttaag

SEQ ID NO: 20152 - DNA, 27 bp, Gossypium hirsutum
gcgaatagaaaatgtcatgcaacaatg

SEQ ID NO: 20153 - DNA, 32 bp, Gossypium hirsutum
ccacagggactaaaaatactaataattaccgt

SEQ ID NO: 20154 - DNA, 20 bp, Gossypium hirsutum
aattggagtgattattttta

SEQ ID NO: 20155 - DNA, 18 bp, Gossypium hirsutum
ttggagtgattgttttta

SEQ ID NO: 20156 - DNA, 46 bp, Gossypium hirsutum
cgattattttcttatttcattctgtattgattttcttagttagatt

SEQ ID NO: 20157 - DNA, 45 bp, Gossypium hirsutum
ctttattattaaccaaaagtgatcaaatctcataatgatgaatta

SEQ ID NO: 20158 - DNA, 21 bp, Gossypium hirsutum
ttgacaataaagtgatataat

SEQ ID NO: 20159 - DNA, 21 bp, Gossypium hirsutum
ttgacaataaagagatataat

SEQ ID NO: 20160 - DNA, 38 bp, Gossypium hirsutum
tcacaccttttaacaaattattcaatagaagtatcctt

SEQ ID NO: 20161 - DNA, 26 bp, Gossypium hirsutum
tgtttcaaggtgcaaaattcgctaat

SEQ ID NO: 20162 - DNA, 20 bp, Gossypium hirsutum
tagtatgcaaagataaataa

SEQ ID NO: 20163 - DNA, 17 bp, Gossypium hirsutum
tatgcaaagaaaaataa

SEQ ID NO: 20164 - DNA, 35 bp, Gossypium hirsutum
aaaaatccatctttttaactagaaattcacacaca

SEQ ID NO: 20165 - DNA, 29 bp, Gossypium hirsutum
actataaacatcaaatggctcacttacca

SEQ ID NO: 20166 - DNA, 16 bp, Gossypium hirsutum
cccatcctctaagacc

SEQ ID NO: 20167 - DNA, 15 bp, Gossypium hirsutum
cccatcctcaagacc

SEQ ID NO: 20168 - DNA, 22 bp, Gossypium hirsutum
ccagaggtcatttaccctgtgt

SEQ ID NO: 20169 - DNA, 34 bp, Gossypium hirsutum
agttgacgtagatattgcttaaaaggaaaaaaag

SEQ ID NO: 20170 - DNA, 23 bp, Gossypium hirsutum
aataccaataacaataatcatct

SEQ ID NO: 20171 - DNA, 22 bp, Gossypium hirsutum
ataccaataacaatactcatct

SEQ ID NO: 20172 - DNA, 34 bp, Gossypium hirsutum
gttgaatgaaatgatgttgtaatagcataaggaa

SEQ ID NO: 20173 - DNA, 30 bp, Gossypium hirsutum
acaatgtattttggctctttcttcactaga

SEQ ID NO: 20174 - DNA, 23 bp, Gossypium hirsutum
tgaagttcatagctattattgta

SEQ ID NO: 20175 - DNA, 21 bp, Gossypium hirsutum
aagttcatagctagtattgta

SEQ ID NO: 20176 - DNA, 46 bp, Gossypium hirsutum
cttggatttgagtattatgatcaaatttatatggaatgatatttaa

SEQ ID NO: 20177 - DNA, 23 bp, Gossypium hirsutum
ggaggaacttttgggcagaattg

SEQ ID NO: 20178 - DNA, 16 bp, Gossypium hirsutum
catctgtggaggcata

SEQ ID NO: 20179 - DNA, 16 bp, Gossypium hirsutum
catctgtgaaggcata

SEQ ID NO: 20180 - DNA, 25 bp, Gossypium hirsutum
attcaatcttttcctcgggttccat

SEQ ID NO: 20181 - DNA, 40 bp, Gossypium hirsutum
tgtaaattgattttttctatcaaaaagttcatccctttta

SEQ ID NO: 20182 - DNA, 22 bp, Gossypium hirsutum
ccacgtcaatttttatcagtag

SEQ ID NO: 20183 - DNA, 21 bp, Gossypium hirsutum
cacgtcaatttttaacagtag

SEQ ID NO: 20184 - DNA, 25 bp, Gossypium hirsutum
ccacgtgttattgtcgggttattct

SEQ ID NO: 20185 - DNA, 33 bp, Gossypium hirsutum
gattcctaaactctatatggatcactataccga

SEQ ID NO: 20186 - DNA, 21 bp, Gossypium hirsutum
aacatatataactgaacttca

SEQ ID NO: 20187 - DNA, 23 bp, Gossypium hirsutum
taaacatatataactaaacttca

SEQ ID NO: 20188 - DNA, 25 bp, Gossypium hirsutum
agattcgaacatgtggtctccattt

SEQ ID NO: 20189 - DNA, 32 bp, Gossypium hirsutum
catataatgatccaatatgcatgcaagaacat

SEQ ID NO: 20190 - DNA, 22 bp, Gossypium hirsutum
tccctttctttaatttatttta

SEQ ID NO: 20191 - DNA, 21 bp, Gossypium hirsutum
ccctttctttaatttaattta

SEQ ID NO: 20192 - DNA, 38 bp, Gossypium hirsutum
tcttgatccttaatttggttttaagtcattcaatttag

SEQ ID NO: 20193 - DNA, 30 bp, Gossypium hirsutum
gaacaacaacaagtacttacgacttttctt

SEQ ID NO: 20194 - DNA, 22 bp, Gossypium hirsutum
caattgtatataatggaactcg

SEQ ID NO: 20195 - DNA, 19 bp, Gossypium hirsutum
ttgtatataatgaaactcg

SEQ ID NO: 20196 - DNA, 25 bp, Gossypium hirsutum
tcacacatggtgagacaaaaatcca

SEQ ID NO: 20197 - DNA, 39 bp, Gossypium hirsutum
gcccttgtactagaagtcaaattgtattttattatttct

SEQ ID NO: 20198 - DNA, 20 bp, Gossypium hirsutum
aaatagcaaatcaataattt

SEQ ID NO: 20199 - DNA, 20 bp, Gossypium hirsutum
aaatagcaaatcaatcattt

SEQ ID NO: 20200 - DNA, 40 bp, Gossypium hirsutum
tcattgtttaattatttcgttagctacattagttttaaca

SEQ ID NO: 20201 - DNA, 28 bp, Gossypium hirsutum
tttcttaaggcagaatgcaagtacatct

SEQ ID NO: 20202 - DNA, 20 bp, Gossypium hirsutum
catgattatatttgaatttt

SEQ ID NO: 20203 - DNA, 19 bp, Gossypium hirsutum
atgattatattcgaatttt

SEQ ID NO: 20204 - DNA, 29 bp, Gossypium hirsutum
gtgtaattgcacccatgtaatacatttga

SEQ ID NO: 20205 - DNA, 30 bp, Gossypium hirsutum
caactgagatgaaaaactgaaacagaagaa

SEQ ID NO: 20206 - DNA, 20 bp, Gossypium hirsutum
tcaatttaccattcaaaaga

SEQ ID NO: 20207 - DNA, 17 bp, Gossypium hirsutum
atttaccgttcaaaaga

SEQ ID NO: 20208 - DNA, 27 bp, Gossypium hirsutum
cggcctgtttcaatgtttatagtatgg

SEQ ID NO: 20209 - DNA, 25 bp, Gossypium hirsutum
cgtgagagagagacacatagagaga

SEQ ID NO: 20210 - DNA, 18 bp, Gossypium hirsutum
cttagttgcccatagcag

SEQ ID NO: 20211 - DNA, 13 bp, Gossypium hirsutum
ttgcccaaagcag

SEQ ID NO: 20212 - DNA, 25 bp, Gossypium hirsutum
gctggtttgtaatgccttctttgtc

SEQ ID NO: 20213 - DNA, 24 bp, Gossypium hirsutum
ggcaatcaggtaaaagtcctgttg

SEQ ID NO: 20214 - DNA, 21 bp, Gossypium hirsutum
tccaatctttctttctcaacc

SEQ ID NO: 20215 - DNA, 19 bp, Gossypium hirsutum
caatctttctttatcaacc

SEQ ID NO: 20216 - DNA, 25 bp, Gossypium hirsutum
ccgcacttttatctccttcacatct

SEQ ID NO: 20217 - DNA, 28 bp, Gossypium hirsutum
tcaacttatttgaacaaactgcccctat

SEQ ID NO: 20218 - DNA, 16 bp, Gossypium hirsutum
caatccaaggaagcct

SEQ ID NO: 20219 - DNA, 15 bp, Gossypium hirsutum
aatccaagcaagcct

SEQ ID NO: 20220 - DNA, 23 bp, Gossypium hirsutum
tcatcaagttgccaagacgttct

SEQ ID NO: 20221 - DNA, 31 bp, Gossypium hirsutum
tgatgaagattgatggtttttatgttgcaaa

SEQ ID NO: 20222 - DNA, 21 bp, Gossypium hirsutum
ttccatcaacaatctattagt

SEQ ID NO: 20223 - DNA, 21 bp, Gossypium hirsutum
ttccatcaacaatttattagt

SEQ ID NO: 20224 - DNA, 32 bp, Gossypium hirsutum
gcacctctactcataattgttcgaattagtta

SEQ ID NO: 20225 - DNA, 24 bp, Gossypium hirsutum
acacctgctctgcttaccaatttt

SEQ ID NO: 20226 - DNA, 21 bp, Gossypium hirsutum
ctaagaagcataaagagaagt

SEQ ID NO: 20227 - DNA, 19 bp, Gossypium hirsutum
aagaagcataaaaagaagt

SEQ ID NO: 20228 - DNA, 35 bp, Gossypium hirsutum
gatactttttacaaattttatgagcataagcccta

SEQ ID NO: 20229 - DNA, 22 bp, Gossypium hirsutum
tggtgcatgtcctccaaatagc

SEQ ID NO: 20230 - DNA, 21 bp, Gossypium hirsutum
tcatactgcttttatcaaatt

SEQ ID NO: 20231 - DNA, 20 bp, Gossypium hirsutum
catactgcttttttcaaatt

SEQ ID NO: 20232 - DNA, 30 bp, Gossypium hirsutum
cctttcatttcatccattaaaggttcaaca

SEQ ID NO: 20233 - DNA, 25 bp, Gossypium hirsutum
actggtgtagccaatgaaataacca

SEQ ID NO: 20234 - DNA, 24 bp, Gossypium hirsutum
cttatattgatgtatagaaactag

SEQ ID NO: 20235 - DNA, 23 bp, Gossypium hirsutum
ttatattgatgtataggaactag

SEQ ID NO: 20236 - DNA, 33 bp, Gossypium hirsutum
gcaaacttgtcattttgataaaaatttcatcca

SEQ ID NO: 20237 - DNA, 30 bp, Gossypium hirsutum
gagtcatagactataaagctgaagatgtca

SEQ ID NO: 20238 - DNA, 19 bp, Gossypium hirsutum
caattgaaaagagtttcag

SEQ ID NO: 20239 - DNA, 18 bp, Gossypium hirsutum
aattgaaaagaatttcag

SEQ ID NO: 20240 - DNA, 26 bp, Gossypium hirsutum
tttcaatgtaggtaggtgtcccaaaa

SEQ ID NO: 20241 - DNA, 32 bp, Gossypium hirsutum
gtcatgagaatcccaatcaaaagaaaaataca

SEQ ID NO: 20242 - DNA, 22 bp, Gossypium hirsutum
atacactataattgagctttag

SEQ ID NO: 20243 - DNA, 22 bp, Gossypium hirsutum
atacactataattgaactttag

SEQ ID NO: 20244 - DNA, 30 bp, Gossypium hirsutum
cttcctcttagttttggatatgtacaacct

SEQ ID NO: 20245 - DNA, 25 bp, Gossypium hirsutum
gaggaacataggtcgagtcaaagaa

SEQ ID NO: 20246 - DNA, 18 bp, Gossypium hirsutum
ccgaacaagattgtttat

SEQ ID NO: 20247 - DNA, 18 bp, Gossypium hirsutum
ccgaacaagattttttat

SEQ ID NO: 20248 - DNA, 24 bp, Gossypium hirsutum
tcggactagattggttggtcaaac

SEQ ID NO: 20249 - DNA, 29 bp, Gossypium hirsutum
accataaagaatagcttgaattgtccctt

SEQ ID NO: 20250 - DNA, 21 bp, Gossypium hirsutum
ctttttctttttgtaatacac

SEQ ID NO: 20251 - DNA, 22 bp, Gossypium hirsutum
cctttttctttttttaatacac

SEQ ID NO: 20252 - DNA, 29 bp, Gossypium hirsutum
gcaagaggaagatataacatctgctaaga

SEQ ID NO: 20253 - DNA, 24 bp, Gossypium hirsutum
acacctgtgaaattcttccacctt

SEQ ID NO: 20254 - DNA, 19 bp, Gossypium hirsutum
tttcacatttgattgctgc

SEQ ID NO: 20255 - DNA, 17 bp, Gossypium hirsutum
tcacatttgcttgctgc

SEQ ID NO: 20256 - DNA, 25 bp, Gossypium hirsutum
gcatgcatggagtaaagacaactga

SEQ ID NO: 20257 - DNA, 34 bp, Gossypium hirsutum
cctatcctcctctcattatttctaatctatcagt

SEQ ID NO: 20258 - DNA, 16 bp, Gossypium hirsutum
ttgttctcgaaaggct

SEQ ID NO: 20259 - DNA, 16 bp, Gossypium hirsutum
ttgttctcaaaaggct

SEQ ID NO: 20260 - DNA, 46 bp, Gossypium hirsutum
gtgtatatatatgatatttatcaatataattgtgccaccaaattta

SEQ ID NO: 20261 - DNA, 33 bp, Gossypium hirsutum
tctgaattctcttgcatggaattttaggataaa

SEQ ID NO: 20262 - DNA, 14 bp, Gossypium hirsutum
acagccggagccgt

SEQ ID NO: 20263 - DNA, 14 bp, Gossypium hirsutum
acagccagagccgt

SEQ ID NO: 20264 - DNA, 24 bp, Gossypium hirsutum
gccaccctcttctttactgctttt

SEQ ID NO: 20265 - DNA, 27 bp, Gossypium hirsutum
cctgtggtgtttgcttaaatgataagg

SEQ ID NO: 20266 - DNA, 20 bp, Gossypium hirsutum
ttcttcccttcttaattgta

SEQ ID NO: 20267 - DNA, 21 bp, Gossypium hirsutum
ttttcttcccttcttattgta

SEQ ID NO: 20268 - DNA, 34 bp, Gossypium hirsutum
tcctagacagctaatggattaagatgatatacaa

SEQ ID NO: 20269 - DNA, 34 bp, Gossypium hirsutum
gctcatcacttccaaaagttagaatttaaaagaa

SEQ ID NO: 20270 - DNA, 22 bp, Gossypium hirsutum
cttacacaaaatccttttctta

SEQ ID NO: 20271 - DNA, 21 bp, Gossypium hirsutum
ttacacaaaatcctattctta

SEQ ID NO: 20272 - DNA, 24 bp, Gossypium hirsutum
ccatgttggacttggagaacttca

SEQ ID NO: 20273 - DNA, 32 bp, Gossypium hirsutum
tggagaagtaattggctagtttttaccttaaa

SEQ ID NO: 20274 - DNA, 17 bp, Gossypium hirsutum
ctcaaatgcagcatatg

SEQ ID NO: 20275 - DNA, 17 bp, Gossypium hirsutum
ctcaaatgctgcatatg

SEQ ID NO: 20276 - DNA, 28 bp, Gossypium hirsutum
tgcacttacaaactaacctcaaagatgt

SEQ ID NO: 20277 - DNA, 26 bp, Gossypium hirsutum
cccctttctctctcaatacatatgca

SEQ ID NO: 20278 - DNA, 21 bp, Gossypium hirsutum
cgtcttattaaccacaccgaa

SEQ ID NO: 20279 - DNA, 19 bp, Gossypium hirsutum
tcttattaaccgcaccgaa

SEQ ID NO: 20280 - DNA, 24 bp, Gossypium hirsutum
tgttttgctctgcggttatacaca

SEQ ID NO: 20281 - DNA, 25 bp, Gossypium hirsutum
ggaaaaggtgtgtatgtgtctgaac

SEQ ID NO: 20282 - DNA, 17 bp, Gossypium hirsutum
caagtatgctcagatgc

SEQ ID NO: 20283 - DNA, 17 bp, Gossypium hirsutum
caagtatgctgagatgc

SEQ ID NO: 20284 - DNA, 27 bp, Gossypium hirsutum
tgcaaccatctatagtctacacttgga

SEQ ID NO: 20285 - DNA, 42 bp, Gossypium hirsutum
ggtaaaatatctccctgctactttttttttaattattgttaa

SEQ ID NO: 20286 - DNA, 18 bp, Gossypium hirsutum
ccctagttaataattttt

SEQ ID NO: 20287 - DNA, 18 bp, Gossypium hirsutum
ccctagttattaattttt

SEQ ID NO: 20288 - DNA, 28 bp, Gossypium hirsutum
gcaacgcctaataactacattatgcaaa

SEQ ID NO: 20289 - DNA, 28 bp, Gossypium hirsutum
ctaagccttaccttactagcaaacgtaa

SEQ ID NO: 20290 - DNA, 15 bp, Gossypium hirsutum
ctcgtatcaaaggcc

SEQ ID NO: 20291 - DNA, 14 bp, Gossypium hirsutum
tcgtatcgaaggcc

SEQ ID NO: 20292 - DNA, 19 bp, Gossypium hirsutum
cgccgcttcaggtgtgtat

SEQ ID NO: 20293 - DNA, 20 bp, Gossypium hirsutum
tgcgtgtcagcggtactaac

SEQ ID NO: 20294 - DNA, 17 bp, Gossypium hirsutum
ttgaccttgtggaacag

SEQ ID NO: 20295 - DNA, 17 bp, Gossypium hirsutum
ttgaccttgtcgaacag

SEQ ID NO: 20296 - DNA, 25 bp, Gossypium hirsutum
cggcttatagcacttcctcaaatca

SEQ ID NO: 20297 - DNA, 30 bp, Gossypium hirsutum
caaacaagcaacttattcacagatattgga

SEQ ID NO: 20298 - DNA, 18 bp, Gossypium hirsutum
cgatgaacactaataaat

SEQ ID NO: 20299 - DNA, 16 bp, Gossypium hirsutum
atgaacacaaataaat

SEQ ID NO: 20300 - DNA, 25 bp, Gossypium hirsutum
cagatcttgggtttaggctcaaagt

SEQ ID NO: 20301 - DNA, 33 bp, Gossypium hirsutum
ttcaactttttacagaaatcgtaaacattgact

SEQ ID NO: 20302 - DNA, 23 bp, Gossypium hirsutum
tgcatatgtactagatagtatta

SEQ ID NO: 20303 - DNA, 21 bp, Gossypium hirsutum
catatgtactagatagcatta

SEQ ID NO: 20304 - DNA, 25 bp, Gossypium hirsutum
ctttgcttcctcttttccctaaggt

SEQ ID NO: 20305 - DNA, 23 bp, Gossypium hirsutum
cttttgggtaagtggagcagttg

SEQ ID NO: 20306 - DNA, 16 bp, Gossypium hirsutum
aatttgcatcgaaatc

SEQ ID NO: 20307 - DNA, 15 bp, Gossypium hirsutum
atttgcctcgaaatc

SEQ ID NO: 20308 - DNA, 28 bp, Gossypium hirsutum
cttatagggacaaaatttgcacacagtt

SEQ ID NO: 20309 - DNA, 24 bp, Gossypium hirsutum
catgaacaatggacgtgaatgagt

SEQ ID NO: 20310 - DNA, 20 bp, Gossypium hirsutum
cctggtcaatactctttact

SEQ ID NO: 20311 - DNA, 19 bp, Gossypium hirsutum
ctggtcaatactatttact

SEQ ID NO: 20312 - DNA, 24 bp, Gossypium hirsutum
tggcaatgttctctctgtcatgtc

SEQ ID NO: 20313 - DNA, 30 bp, Gossypium hirsutum
gcacattttggaaaatcatggataagatca

SEQ ID NO: 20314 - DNA, 18 bp, Gossypium hirsutum
ctgaagttgtgaaagtat

SEQ ID NO: 20315 - DNA, 19 bp, Gossypium hirsutum
tctgaagttgtaaaagtat

SEQ ID NO: 20316 - DNA, 35 bp, Gossypium hirsutum
cttagaagtgaagtaagttcaagcaaatttagaac

SEQ ID NO: 20317 - DNA, 22 bp, Gossypium hirsutum
aggatctagcacatggcattcc

SEQ ID NO: 20318 - DNA, 17 bp, Gossypium hirsutum
caggaaaccagcacatg

SEQ ID NO: 20319 - DNA, 17 bp, Gossypium hirsutum
caggaaaccaacacatg

SEQ ID NO: 20320 - DNA, 31 bp, Gossypium hirsutum
aagcatttccaaagtataaaaaaaggaaggg

SEQ ID NO: 20321 - DNA, 23 bp, Gossypium hirsutum
cacgccatcaaagacctacagaa

SEQ ID NO: 20322 - DNA, 22 bp, Gossypium hirsutum
actgaagaaaaaaaataattaa

SEQ ID NO: 20323 - DNA, 21 bp, Gossypium hirsutum
actgaagaaaaaaataattaa

SEQ ID NO: 20324 - DNA, 29 bp, Gossypium hirsutum
gactacaatgaaaactgcatctgttttct

SEQ ID NO: 20325 - DNA, 29 bp, Gossypium hirsutum
cagcactatcagtagtgaaaaggatatct

SEQ ID NO: 20326 - DNA, 21 bp, Gossypium hirsutum
acaaccaatataactaaatta

SEQ ID NO: 20327 - DNA, 20 bp, Gossypium hirsutum
caaccaatataagtaaatta

SEQ ID NO: 20328 - DNA, 30 bp, Gossypium hirsutum
agttggactagaaaaacttaaaagctcagt

SEQ ID NO: 20329 - DNA, 29 bp, Gossypium hirsutum
cttgctttggtcgattaagttttaactca

SEQ ID NO: 20330 - DNA, 16 bp, Gossypium hirsutum
atcctcctagattgac

SEQ ID NO: 20331 - DNA, 16 bp, Gossypium hirsutum
atcctcctacattgac

SEQ ID NO: 20332 - DNA, 20 bp, Gossypium hirsutum
tgcgctttagcacactcgaa

SEQ ID NO: 20333 - DNA, 32 bp, Gossypium hirsutum
tttctgattacaaagttgaaacagttgtttga

SEQ ID NO: 20334 - DNA, 19 bp, Gossypium hirsutum
caattggtccactagttta

SEQ ID NO: 20335 - DNA, 16 bp, Gossypium hirsutum
ttggtccaccagttta

SEQ ID NO: 20336 - DNA, 25 bp, Gossypium hirsutum
aaaaagccaaccacacacaagtaaa

SEQ ID NO: 20337 - DNA, 34 bp, Gossypium hirsutum
gtttaacgagtgggatgtaaatatgacttaagta

SEQ ID NO: 20338 - DNA, 20 bp, Gossypium hirsutum
tgtaaagcaactaagtatca

SEQ ID NO: 20339 - DNA, 17 bp, Gossypium hirsutum
aaagcaactaaatatca

SEQ ID NO: 20340 - DNA, 21 bp, Gossypium hirsutum
cctcttcggtccatggaacac

SEQ ID NO: 20341 - DNA, 24 bp, Gossypium hirsutum
gcatttccaggaacagactaaagg

SEQ ID NO: 20342 - DNA, 20 bp, Gossypium hirsutum
ctcaagatgatgaagtgaag

SEQ ID NO: 20343 - DNA, 18 bp, Gossypium hirsutum
caagatgatggagtgaag

SEQ ID NO: 20344 - DNA, 32 bp, Gossypium hirsutum
gcaactcaatttcgttacaaagttttaatgtc

SEQ ID NO: 20345 - DNA, 24 bp, Gossypium hirsutum
gctgaacaatttccagttgggatt

SEQ ID NO: 20346 - DNA, 22 bp, Gossypium hirsutum
catgttttaagttaaaaaacat

SEQ ID NO: 20347 - DNA, 21 bp, Gossypium hirsutum
atgttttaagttaaaaaccat

SEQ ID NO: 20348 - DNA, 25 bp, Gossypium hirsutum
cctcgtaccttcaacaattggtttt

SEQ ID NO: 20349 - DNA, 30 bp, Gossypium hirsutum
atcagcttttcccattatttttgacattgt

SEQ ID NO: 20350 - DNA, 16 bp, Gossypium hirsutum
caccctcttccaaaac

SEQ ID NO: 20351 - DNA, 15 bp, Gossypium hirsutum
accctctcccaaaac

SEQ ID NO: 20352 - DNA, 26 bp, Gossypium hirsutum
ttacaactccgaaatacagtcaacgt

SEQ ID NO: 20353 - DNA, 32 bp, Gossypium hirsutum
aggttttgacatgaattttgaatctaaaagca

SEQ ID NO: 20354 - DNA, 21 bp, Gossypium hirsutum
atattgtggaagaatgttatg

SEQ ID NO: 20355 - DNA, 21 bp, Gossypium hirsutum
atattgtggaagattgttatg

SEQ ID NO: 20356 - DNA, 32 bp, Gossypium hirsutum
gcatgtttaggctttataaatctctttaagca

SEQ ID NO: 20357 - DNA, 24 bp, Gossypium hirsutum
ggcatggagatgaagaccaaagag

SEQ ID NO: 20358 - DNA, 19 bp, Gossypium hirsutum
ccacaaaaggatacactac

SEQ ID NO: 20359 - DNA, 17 bp, Gossypium hirsutum
acaaaaggacacactac

SEQ ID NO: 20360 - DNA, 29 bp, Gossypium hirsutum
cctttgcctattaatttgacttcattcct

SEQ ID NO: 20361 - DNA, 24 bp, Gossypium hirsutum
gaaagcatcgacgactacttccat

SEQ ID NO: 20362 - DNA, 19 bp, Gossypium hirsutum
ccattagggcttgacagta

SEQ ID NO: 20363 - DNA, 18 bp, Gossypium hirsutum
cattagggctggacagta

SEQ ID NO: 20364 - DNA, 29 bp, Gossypium hirsutum
cttccagattaaacctccatttacaagga

SEQ ID NO: 20365 - DNA, 28 bp, Gossypium hirsutum
ttaaaacctgtaactcttccgtaccaaa

SEQ ID NO: 20366 - DNA, 25 bp, Gossypium hirsutum
agacttaaactaattatttattctc

SEQ ID NO: 20367 - DNA, 23 bp, Gossypium hirsutum
acttaaactaattacttattctc

SEQ ID NO: 20368 - DNA, 30 bp, Gossypium hirsutum
ttggctaaggattgttttttaattgcgtta

SEQ ID NO: 20369 - DNA, 18 bp, Gossypium hirsutum
gccggttcgaccaaatcg

SEQ ID NO: 20370 - DNA, 14 bp, Gossypium hirsutum
caccacccgccatt

SEQ ID NO: 20371 - DNA, 14 bp, Gossypium hirsutum
caccagccgccatt

SEQ ID NO: 20372 - DNA, 25 bp, Gossypium hirsutum
aacttttgtccccctaactatgctt

SEQ ID NO: 20373 - DNA, 25 bp, Gossypium hirsutum
gctaaggtcattggtaaaacaagct

SEQ ID NO: 20374 - DNA, 20 bp, Gossypium hirsutum
atgggaagatattgatcata

SEQ ID NO: 20375 - DNA, 20 bp, Gossypium hirsutum
atgggaagatattcatcata

SEQ ID NO: 20376 - DNA, 26 bp, Gossypium hirsutum
gtttgtttcatccaactcgagtcaac

SEQ ID NO: 20377 - DNA, 20 bp, Gossypium hirsutum
aattttgccacgacgcgaaa

SEQ ID NO: 20378 - DNA, 18 bp, Gossypium hirsutum
aagctcctaacgttcgtt

SEQ ID NO: 20379 - DNA, 19 bp, Gossypium hirsutum
taagctcctaaccttcgtt

SEQ ID NO: 20380 - DNA, 29 bp, Gossypium hirsutum
ctaaaccctcaaaaagctcaatttctcat

SEQ ID NO: 20381 - DNA, 24 bp, Gossypium hirsutum
cgctcttaccaccttacagcatac

SEQ ID NO: 20382 - DNA, 19 bp, Gossypium hirsutum
tttttgcagttaattaatt

SEQ ID NO: 20383 - DNA, 19 bp, Gossypium hirsutum
tttttgcagtaaattaatt

SEQ ID NO: 20384 - DNA, 25 bp, Gossypium hirsutum
ccatgttggtgcatttgaaggtttt

SEQ ID NO: 20385 - DNA, 30 bp, Gossypium hirsutum
acttgaggcttaatttatttgagtgaatgc

SEQ ID NO: 20386 - DNA, 18 bp, Gossypium hirsutum
ctgtttcacttaaagaaa

SEQ ID NO: 20387 - DNA, 17 bp, Gossypium hirsutum
tgtttcacttgaagaaa

SEQ ID NO: 20388 - DNA, 21 bp, Gossypium hirsutum
cgacttcacccctaccaagaa

SEQ ID NO: 20389 - DNA, 23 bp, Gossypium hirsutum
agcagttcatgggagatgttacg

SEQ ID NO: 20390 - DNA, 14 bp, Gossypium hirsutum
cctgagctgaatcc

SEQ ID NO: 20391 - DNA, 13 bp, Gossypium hirsutum
ctgagccgaatcc

SEQ ID NO: 20392 - DNA, 18 bp, Gossypium hirsutum
cctccgaccacccattcc

SEQ ID NO: 20393 - DNA, 32 bp, Gossypium hirsutum
ttgttaaatcaaaatggtgataggaagcattc

SEQ ID NO: 20394 - DNA, 20 bp, Gossypium hirsutum
ctatatttttggcacatcat

SEQ ID NO: 20395 - DNA, 20 bp, Gossypium hirsutum
ctatatttttgccacatcat

SEQ ID NO: 20396 - DNA, 25 bp, Gossypium hirsutum
ggttcacaactcgtttcaccaatta

SEQ ID NO: 20397 - DNA, 25 bp, Gossypium hirsutum
ctgcacctcaatctccatcatcaat

SEQ ID NO: 20398 - DNA, 20 bp, Gossypium hirsutum
caccactatcaataatctat

SEQ ID NO: 20399 - DNA, 20 bp, Gossypium hirsutum
caccactatcaattatctat

SEQ ID NO: 20400 - DNA, 25 bp, Gossypium hirsutum
tgctatttttgggctatggtttcct

SEQ ID NO: 20401 - DNA, 26 bp, Gossypium hirsutum
gtgtctgaaaatgtaccaacattgct

SEQ ID NO: 20402 - DNA, 15 bp, Gossypium hirsutum
ctccaagcgtccaac

SEQ ID NO: 20403 - DNA, 15 bp, Gossypium hirsutum
ctccaagcctccaac

SEQ ID NO: 20404 - DNA, 25 bp, Gossypium hirsutum
tgactgctgggtttcattttctcta

SEQ ID NO: 20405 - DNA, 24 bp, Gossypium hirsutum
gccttcttctgcttgtaccttgaa

SEQ ID NO: 20406 - DNA, 18 bp, Gossypium hirsutum
ctcagcttcttcaacatg

SEQ ID NO: 20407 - DNA, 16 bp, Gossypium hirsutum
cagcttcttaaacatg

SEQ ID NO: 20408 - DNA, 26 bp, Gossypium hirsutum
atctcgactatttcttctggctcttg

SEQ ID NO: 20409 - DNA, 25 bp, Gossypium hirsutum
ggctaaagttggatcttgggatcta

SEQ ID NO: 20410 - DNA, 16 bp, Gossypium hirsutum
ccagagttgactattg

SEQ ID NO: 20411 - DNA, 15 bp, Gossypium hirsutum
cagagttggctattg

SEQ ID NO: 20412 - DNA, 35 bp, Gossypium hirsutum
aacagatgaaaactaaccatttctaaacacaattt

SEQ ID NO: 20413 - DNA, 23 bp, Gossypium hirsutum
tcacaacccacaagtccagattg

SEQ ID NO: 20414 - DNA, 18 bp, Gossypium hirsutum
ctttgaaaggctaataat

SEQ ID NO: 20415 - DNA, 18 bp, Gossypium hirsutum
ctttgaaatgctaataat

SEQ ID NO: 20416 - DNA, 26 bp, Gossypium hirsutum
gctgaatagtgtttcttgtcctgctt

SEQ ID NO: 20417 - DNA, 35 bp, Gossypium hirsutum
tcgaaacttgttgtctaatatgtttaattacctct

SEQ ID NO: 20418 - DNA, 18 bp, Gossypium hirsutum
taaccttgttgacttcag

SEQ ID NO: 20419 - DNA, 18 bp, Gossypium hirsutum
taaccttgttcacttcag

SEQ ID NO: 20420 - DNA, 22 bp, Gossypium hirsutum
caaaggcattgccagtttctca

SEQ ID NO: 20421 - DNA, 30 bp, Gossypium hirsutum
tgtctatactaattcctagagtcattggca

SEQ ID NO: 20422 - DNA, 15 bp, Gossypium hirsutum
cagagggtaagaaac

SEQ ID NO: 20423 - DNA, 15 bp, Gossypium hirsutum
cagaggataagaaac

SEQ ID NO: 20424 - DNA, 34 bp, Gossypium hirsutum
tcaaaagaataacaaagaatcaatgatgaaccaa

SEQ ID NO: 20425 - DNA, 26 bp, Gossypium hirsutum
gcaaagcaggctgttattacagctat

SEQ ID NO: 20426 - DNA, 24 bp, Gossypium hirsutum
ctaacttgcaaataaagtagtatt

SEQ ID NO: 20427 - DNA, 19 bp, Gossypium hirsutum
ttgcaaataaagcagtatt

SEQ ID NO: 20428 - DNA, 26 bp, Gossypium hirsutum
gcttaacctaaagccttttgaacact

SEQ ID NO: 20429 - DNA, 34 bp, Gossypium hirsutum
ccgaactgttttactatctttcaaatatatggga

SEQ ID NO: 20430 - DNA, 18 bp, Gossypium hirsutum
aacatgtgtatgtgctcg

SEQ ID NO: 20431 - DNA, 18 bp, Gossypium hirsutum
aacatgtgtatatgctcg

SEQ ID NO: 20432 - DNA, 24 bp, Gossypium hirsutum
acgagtgtaggatacaggtatgca

SEQ ID NO: 20433 - DNA, 27 bp, Gossypium hirsutum
ggatgactaaaagaaggcaaagacttg

SEQ ID NO: 20434 - DNA, 15 bp, Gossypium hirsutum
caggcttcagttaat

SEQ ID NO: 20435 - DNA, 15 bp, Gossypium hirsutum
caggcttcggttaat

SEQ ID NO: 20436 - DNA, 41 bp, Gossypium hirsutum
agtaagactttttgtagtaatatcttttcctgataaaacat

SEQ ID NO: 20437 - DNA, 24 bp, Gossypium hirsutum
cccgctctttgcaaatcttagatc

SEQ ID NO: 20438 - DNA, 17 bp, Gossypium hirsutum
ccaacagtttaaagaaa

SEQ ID NO: 20439 - DNA, 17 bp, Gossypium hirsutum
ccaacagttaaaagaaa

SEQ ID NO: 20440 - DNA, 27 bp, Gossypium hirsutum
ccatttggcataaaaagtaacctgtgt

SEQ ID NO: 20441 - DNA, 30 bp, Gossypium hirsutum
gcctgaagttacatatctattacaggcaaa

SEQ ID NO: 20442 - DNA, 16 bp, Gossypium hirsutum
catcaccaagaaggaa

SEQ ID NO: 20443 - DNA, 15 bp, Gossypium hirsutum
atcacccagaaggaa

SEQ ID NO: 20444 - DNA, 25 bp, Gossypium hirsutum
caggtttcaagctgcctattacatt

SEQ ID NO: 20445 - DNA, 25 bp, Gossypium hirsutum
ctcatagctccacctctcattcttt

SEQ ID NO: 20446 - DNA, 20 bp, Gossypium hirsutum
acctgtaaaaaaataaaaat

SEQ ID NO: 20447 - DNA, 19 bp, Gossypium hirsutum
acctgtaaaaaataaaaat

SEQ ID NO: 20448 - DNA, 29 bp, Gossypium hirsutum
agccacaaaatccaatccaattttaaaca

SEQ ID NO: 20449 - DNA, 30 bp, Gossypium hirsutum
atgtattgcatttccagatattgtatggga

SEQ ID NO: 20450 - DNA, 20 bp, Gossypium hirsutum
caaaattttgtgttggactt

SEQ ID NO: 20451 - DNA, 20 bp, Gossypium hirsutum
caaaattttgtgatggactt

SEQ ID NO: 20452 - DNA, 33 bp, Gossypium hirsutum
acataatcttaaccaagttttatcaagggacag

SEQ ID NO: 20453 - DNA, 34 bp, Gossypium hirsutum
ccaacataaatgaactcaaaaaaatccatacaca

SEQ ID NO: 20454 - DNA, 16 bp, Gossypium hirsutum
atccaaggtcaatgat

SEQ ID NO: 20455 - DNA, 17 bp, Gossypium hirsutum
catccaaggttaatgat

SEQ ID NO: 20456 - DNA, 28 bp, Gossypium hirsutum
cccaggattcttaacgtactctatgttt

SEQ ID NO: 20457 - DNA, 25 bp, Gossypium hirsutum
gcttgtgcaattgtgcaatcttttt

SEQ ID NO: 20458 - DNA, 18 bp, Gossypium hirsutum
ctgcaatttggctcacac

SEQ ID NO: 20459 - DNA, 18 bp, Gossypium hirsutum
ctgcaatttgtctcacac

SEQ ID NO: 20460 - DNA, 25 bp, Gossypium hirsutum
cggcatcttcaattcaggtggatta

SEQ ID NO: 20461 - DNA, 29 bp, Gossypium hirsutum
gtgagtctacatttctatttgggatgtct

SEQ ID NO: 20462 - DNA, 17 bp, Gossypium hirsutum
cacactactgtaacttt

SEQ ID NO: 20463 - DNA, 19 bp, Gossypium hirsutum
atcacactactataacttt

SEQ ID NO: 20464 - DNA, 25 bp, Gossypium hirsutum
cactactgcaactgtctgtttgttt

SEQ ID NO: 20465 - DNA, 25 bp, Gossypium hirsutum
tcgaatgaatcctaaagccctgatg

SEQ ID NO: 20466 - DNA, 15 bp, Gossypium hirsutum
cacgaaaaaactctg

SEQ ID NO: 20467 - DNA, 15 bp, Gossypium hirsutum
cacgaaaagactctg

SEQ ID NO: 20468 - DNA, 32 bp, Gossypium hirsutum
gcagtagaataacacagaacaaaatttttcct

SEQ ID NO: 20469 - DNA, 30 bp, Gossypium hirsutum
tccatgtttcagttgtatgtaacaggttaa

SEQ ID NO: 20470 - DNA, 22 bp, Gossypium hirsutum
tcatgttagtacccctcagaat

SEQ ID NO: 20471 - DNA, 22 bp, Gossypium hirsutum
atcatgttagtaccctcagaat

SEQ ID NO: 20472 - DNA, 33 bp, Gossypium hirsutum
tcggagctgaaagagttatttaagtattatgac

SEQ ID NO: 20473 - DNA, 31 bp, Gossypium hirsutum
ctttctcccaatcaaaaagaattacaaagga

SEQ ID NO: 20474 - DNA, 17 bp, Gossypium hirsutum
tcaacatatggaaaatg

SEQ ID NO: 20475 - DNA, 17 bp, Gossypium hirsutum
tcaacatatagaaaatg

SEQ ID NO: 20476 - DNA, 30 bp, Gossypium hirsutum
attggaaacacttcatctttaaatgttgca

SEQ ID NO: 20477 - DNA, 35 bp, Gossypium hirsutum
agatagttattacataagataaactgtgggactct

SEQ ID NO: 20478 - DNA, 21 bp, Gossypium hirsutum
caatcttcatttcgtatattg

SEQ ID NO: 20479 - DNA, 20 bp, Gossypium hirsutum
aatcttcatttcatatattg

SEQ ID NO: 20480 - DNA, 39 bp, Gossypium hirsutum
ctgaacttttttctaaattatccatatcttcttgaaact

SEQ ID NO: 20481 - DNA, 26 bp, Gossypium hirsutum
gcactcaacgggaagttaataatgtg

SEQ ID NO: 20482 - DNA, 15 bp, Gossypium hirsutum
atcaccgttaatttt

SEQ ID NO: 20483 - DNA, 16 bp, Gossypium hirsutum
catcaccattaatttt

SEQ ID NO: 20484 - DNA, 31 bp, Gossypium hirsutum
tgctttttatttagggtttttagctgttgac

SEQ ID NO: 20485 - DNA, 27 bp, Gossypium hirsutum
cccaagcactgtaaattacagctacaa

SEQ ID NO: 20486 - DNA, 22 bp, Gossypium hirsutum
aataatgaaattgtggtatctt

SEQ ID NO: 20487 - DNA, 25 bp, Gossypium hirsutum
cttaataatgaaattgtagtatctt

SEQ ID NO: 20488 - DNA, 33 bp, Gossypium hirsutum
ccatgctgtaagtatttatgttgtcttaaaaca

SEQ ID NO: 20489 - DNA, 25 bp, Gossypium hirsutum
ccacaaataaactttgccaccttct

SEQ ID NO: 20490 - DNA, 17 bp, Gossypium hirsutum
catatcctccaaaatat

SEQ ID NO: 20491 - DNA, 16 bp, Gossypium hirsutum
atatcctccgaaatat

SEQ ID NO: 20492 - DNA, 23 bp, Gossypium hirsutum
agagcagtggcttctgttatgtg

SEQ ID NO: 20493 - DNA, 33 bp, Gossypium hirsutum
cctttcgaattacatatgcctattaagctttat

SEQ ID NO: 20494 - DNA, 16 bp, Gossypium hirsutum
ttcacgtgtgtgctgc

SEQ ID NO: 20495 - DNA, 16 bp, Gossypium hirsutum
ttcacgtgtttgctgc

SEQ ID NO: 20496 - DNA, 30 bp, Gossypium hirsutum
ccagcagccttttctttttatttgatatga

SEQ ID NO: 20497 - DNA, 25 bp, Gossypium hirsutum
cgaatcctgttgtaaacgccaaaaa

SEQ ID NO: 20498 - DNA, 15 bp, Gossypium hirsutum
ttcggcagcgtattg

SEQ ID NO: 20499 - DNA, 16 bp, Gossypium hirsutum
attcggcaacgtattg

SEQ ID NO: 20500 - DNA, 25 bp, Gossypium hirsutum
gtccgcatctgtattttggtatgga

SEQ ID NO: 20501 - DNA, 28 bp, Gossypium hirsutum
ttgttctggaatagaaatagtagccagc

SEQ ID NO: 20502 - DNA, 17 bp, Gossypium hirsutum
ttcatttgaccaaattg

SEQ ID NO: 20503 - DNA, 14 bp, Gossypium hirsutum
atttggccaaattg

SEQ ID NO: 20504 - DNA, 28 bp, Gossypium hirsutum
gtggcctaaaaagtttcaatatgagctt

SEQ ID NO: 20505 - DNA, 25 bp, Gossypium hirsutum
ggaacagaagtggatagcattagca

SEQ ID NO: 20506 - DNA, 13 bp, Gossypium hirsutum
ccatcaaaaaaag

SEQ ID NO: 20507 - DNA, 13 bp, Gossypium hirsutum
cccatcaaaaaag

SEQ ID NO: 20508 - DNA, 27 bp, Gossypium hirsutum
tcaccgttattgttgtgataaatgcac

SEQ ID NO: 20509 - DNA, 20 bp, Gossypium hirsutum
accacgccctctctcttctt

SEQ ID NO: 20510 - DNA, 24 bp, Gossypium hirsutum
caaagaaaataaagtagtataaaa

SEQ ID NO: 20511 - DNA, 24 bp, Gossypium hirsutum
caaagaaaataaaatagtataaaa

SEQ ID NO: 20512 - DNA, 25 bp, Gossypium hirsutum
tgatacacaaagcaaagggagtctt

SEQ ID NO: 20513 - DNA, 20 bp, Gossypium hirsutum
gctgcaccggaggaattttt

SEQ ID NO: 20514 - DNA, 17 bp, Gossypium hirsutum
caatacagtcaatgcgc

SEQ ID NO: 20515 - DNA, 16 bp, Gossypium hirsutum
aatacagtgaatgcgc

SEQ ID NO: 20516 - DNA, 26 bp, Gossypium hirsutum
tttgctctaccttgttgtcaagaact

SEQ ID NO: 20517 - DNA, 19 bp, Gossypium hirsutum
cttcgggaccctcgttgtt

SEQ ID NO: 20518 - DNA, 21 bp, Gossypium hirsutum
caatcaagtgattttccatcc

SEQ ID NO: 20519 - DNA, 17 bp, Gossypium hirsutum
caagtgatttgccatcc

SEQ ID NO: 20520 - DNA, 29 bp, Gossypium hirsutum
gtgatagatatgataggtctgagaaccct

SEQ ID NO: 20521 - DNA, 19 bp, Gossypium hirsutum
aggacgcgggctgaatttt

SEQ ID NO: 20522 - DNA, 15 bp, Gossypium hirsutum
ccgggtttgggtcgg

SEQ ID NO: 20523 - DNA, 14 bp, Gossypium hirsutum
cgggtttggatcgg

SEQ ID NO: 20524 - DNA, 31 bp, Gossypium hirsutum
cttttaaacatatataatttcatgggccggg

SEQ ID NO: 20525 - DNA, 24 bp, Gossypium hirsutum
attacaggactgcaaggcaactat

SEQ ID NO: 20526 - DNA, 16 bp, Gossypium hirsutum
tcctttccgtgacttc

SEQ ID NO: 20527 - DNA, 14 bp, Gossypium hirsutum
ctttccgagacttc

SEQ ID NO: 20528 - DNA, 22 bp, Gossypium hirsutum
tctccagccatttcttgcatct

SEQ ID NO: 20529 - DNA, 28 bp, Gossypium hirsutum
agaaagccgggaacttattcttttagtt

SEQ ID NO: 20530 - DNA, 19 bp, Gossypium hirsutum
actgaaagaccccggtgta

SEQ ID NO: 20531 - DNA, 20 bp, Gossypium hirsutum
aactgaaagaccctggtgta

SEQ ID NO: 20532 - DNA, 25 bp, Gossypium hirsutum
tggagagacatatgacacaggagtt

SEQ ID NO: 20533 - DNA, 25 bp, Gossypium hirsutum
cgaaacgagaaatccatgacgatga

SEQ ID NO: 20534 - DNA, 20 bp, Gossypium hirsutum
ctgaagactagtcccccaat

SEQ ID NO: 20535 - DNA, 20 bp, Gossypium hirsutum
ctgaagactagtaccccaat

SEQ ID NO: 20536 - DNA, 23 bp, Gossypium hirsutum
gcccgatctactttccctaaggt

SEQ ID NO: 20537 - DNA, 25 bp, Gossypium hirsutum
caagtcctcctcacgtttcagttta

SEQ ID NO: 20538 - DNA, 20 bp, Gossypium hirsutum
ccactagtcttagtctaaaa

SEQ ID NO: 20539 - DNA, 19 bp, Gossypium hirsutum
cactagtcttagactaaaa

SEQ ID NO: 20540 - DNA, 26 bp, Gossypium hirsutum
gctcttgtcggtatatcgtaagttga

SEQ ID NO: 20541 - DNA, 30 bp, Gossypium hirsutum
ggtctacttatcatcgaaaaactccatagt

SEQ ID NO: 20542 - DNA, 19 bp, Gossypium hirsutum
aagtcttgaagaaaactat

SEQ ID NO: 20543 - DNA, 16 bp, Gossypium hirsutum
tcttgaagcaaactat

SEQ ID NO: 20544 - DNA, 25 bp, Gossypium hirsutum
ccgtagttttgggatggagagttta

SEQ ID NO: 20545 - DNA, 29 bp, Gossypium hirsutum
tccataatcccacaacctttacatcaaaa

SEQ ID NO: 20546 - DNA, 17 bp, Gossypium hirsutum
atttgagcacgtttcgt

SEQ ID NO: 20547 - DNA, 16 bp, Gossypium hirsutum
tttgagcacatttcgt

SEQ ID NO: 20548 - DNA, 28 bp, Gossypium hirsutum
gggtgcttcttctcgaaatttatagtgt

SEQ ID NO: 20549 - DNA, 31 bp, Gossypium hirsutum
tttagtaatatttgttctgtactccctgctg

SEQ ID NO: 20550 - DNA, 19 bp, Gossypium hirsutum
ctgcttctttctttctttt

SEQ ID NO: 20551 - DNA, 18 bp, Gossypium hirsutum
tgcttctttctttttttt

SEQ ID NO: 20552 - DNA, 25 bp, Gossypium hirsutum
gacaggtgatctggactcaattcaa

SEQ ID NO: 20553 - DNA, 31 bp, Gossypium hirsutum; identical to SEQ ID NO: 18221

SEQ ID NO: 20554 - DNA, 23 bp, Gossypium hirsutum
ttttttacagaattataaaattt

SEQ ID NO: 20555 - DNA, 25 bp, Gossypium hirsutum
atttttttacagaattataatattt

SEQ ID NO: 20556 - DNA, 30 bp, Gossypium hirsutum; identical to SEQ ID NO: 18224

SEQ ID NO: 20557 - DNA, 34 bp, Gossypium hirsutum
gtgcatgtatgtcgtttcataattgagttatatt

SEQ ID NO: 20558 - DNA, 18 bp, Gossypium hirsutum
aatttgaccgtataaaat

SEQ ID NO: 20559 - DNA, 16 bp, Gossypium hirsutum
tttgacggtataaaat

SEQ ID NO: 20560 - DNA, 26 bp, Gossypium hirsutum
aagccattgttttgggtttagcattt

SEQ ID NO: 20561 - DNA, 22 bp, Gossypium hirsutum
gcttccctgtgcggtaaaagta

SEQ ID NO: 20562 - DNA, 14 bp, Gossypium hirsutum
ccgcaagctttcac

SEQ ID NO: 20563 - DNA, 14 bp, Gossypium hirsutum
ccgcaatctttcac

SEQ ID NO: 20564 - DNA, 23 bp, Gossypium hirsutum
acaatgaagggcaagggatgaag

SEQ ID NO: 20565 - DNA, 42 bp, Gossypium hirsutum
gataaggtttttactgttcacaaatcttatttatttctgtaa

SEQ ID NO: 20566 - DNA, 23 bp, Gossypium hirsutum
aaaaaaggagaaaaaattacaac

SEQ ID NO: 20567 - DNA, 20 bp, Gossypium hirsutum
aaaaggagaaaaaatacaac

SEQ ID NO: 20568 - DNA, 25 bp, Gossypium hirsutum
cggtaccttcactttttcaggcttt

SEQ ID NO: 20569 - DNA, 25 bp, Gossypium hirsutum
aaaccatgattttgctatggcgaaa

SEQ ID NO: 20570 - DNA, 21 bp, Gossypium hirsutum
atagtttcctaaacctttttt

SEQ ID NO: 20571 - DNA, 21 bp, Gossypium hirsutum
atagtttcctaaacttttttt

SEQ ID NO: 20572 - DNA, 29 bp, Gossypium hirsutum
tgttcaccatcaacaagatgacattagaa

SEQ ID NO: 20573 - DNA, 30 bp, Gossypium hirsutum
cttgttcccaagtaagcctacgttaatata

SEQ ID NO: 20574 - DNA, 21 bp, Gossypium hirsutum
actgtttttctttagaagcaa

SEQ ID NO: 20575 - DNA, 20 bp, Gossypium hirsutum
ctgtttttctttacaagcaa

SEQ ID NO: 20576 - DNA, 32 bp, Gossypium hirsutum
gggttcatgcatgtctttctttttaaatatca

SEQ ID NO: 20577 - DNA, 20 bp, Gossypium hirsutum
attaggtgaccaccgttggg

SEQ ID NO: 20578 - DNA, 17 bp, Gossypium hirsutum
tctctctctggtccacc

SEQ ID NO: 20579 - DNA, 16 bp, Gossypium hirsutum
ctctctctgatccacc

SEQ ID NO: 20580 - DNA, 25 bp, Gossypium hirsutum
gtattgcttgggttttccacttcaa

SEQ ID NO: 20581 - DNA, 30 bp, Gossypium hirsutum
gacccagaaacaaattccttagatttagga

SEQ ID NO: 20582 - DNA, 18 bp, Gossypium hirsutum
cttggagttcccatataa

SEQ ID NO: 20583 - DNA, 17 bp, Gossypium hirsutum
cttggagttcccaataa

SEQ ID NO: 20584 - DNA, 26 bp, Gossypium hirsutum
gtgttagatcgttgtagtgacttcga

SEQ ID NO: 20585 - DNA, 26 bp, Gossypium hirsutum
gacagtcttcagtgccttgatttaga

SEQ ID NO: 20586 - DNA, 17 bp, Gossypium hirsutum
aaagtggctactcattc

SEQ ID NO: 20587 - DNA, 17 bp, Gossypium hirsutum
aaagtggcttctcattc

SEQ ID NO: 20588 - DNA, 22 bp, Gossypium hirsutum
acggctcaaaatccagtgtgat

SEQ ID NO: 20589 - DNA, 21 bp, Gossypium hirsutum
gcaggagctgtgttcaacttg

SEQ ID NO: 20590 - DNA, 15 bp, Gossypium hirsutum
tgcatcgccgcatag

SEQ ID NO: 20591 - DNA, 16 bp, Gossypium hirsutum
ctgcatcaccgcatag

SEQ ID NO: 20592 - DNA, 25 bp, Gossypium hirsutum
cgtgccgaaatgtttttcgattttg

SEQ ID NO: 20593 - DNA, 42 bp, Gossypium hirsutum
ttgattttagtcataaatttcgttgagtttgtttaagtaata

SEQ ID NO: 20594 - DNA, 20 bp, Gossypium hirsutum
tgctagacctattacacatt

SEQ ID NO: 20595 - DNA, 18 bp, Gossypium hirsutum
ctagacctatgacacatt

SEQ ID NO: 20596 - DNA, 25 bp, Gossypium hirsutum
agaaagatttcttgcacaccactct

SEQ ID NO: 20597 - DNA, 26 bp, Gossypium hirsutum
aacagacagatctcaggttgacaaag

SEQ ID NO: 20598 - DNA, 16 bp, Gossypium hirsutum
caatggaagcagtttt

SEQ ID NO: 20599 - DNA, 13 bp, Gossypium hirsutum
tggaagcaatttt

SEQ ID NO: 20600 - DNA, 29 bp, Gossypium hirsutum
acgattacttaatttgtacgagagccttt

SEQ ID NO: 20601 - DNA, 19 bp, Gossypium hirsutum
ggcgcctctaccattgcat

SEQ ID NO: 20602 - DNA, 18 bp, Gossypium hirsutum
tcaatttggctagaacca

SEQ ID NO: 20603 - DNA, 16 bp, Gossypium hirsutum
aatttggctggaacca

SEQ ID NO: 20604 - DNA, 23 bp, Gossypium hirsutum
actcatttgccaaactggtgact

SEQ ID NO: 20605 - DNA, 35 bp, Gossypium hirsutum
aatgaagttggtgaatataattgttttctgaatgt

SEQ ID NO: 20606 - DNA, 20 bp, Gossypium hirsutum
atttcactcatatgagaaaa

SEQ ID NO: 20607 - DNA, 18 bp, Gossypium hirsutum
ttcactcatacgagaaaa

SEQ ID NO: 20608 - DNA, 26 bp, Gossypium hirsutum
agtgaagttcagaacagtatggcaaa

SEQ ID NO: 20609 - DNA, 39 bp, Gossypium hirsutum; identical to SEQ ID NO: 18233

SEQ ID NO: 20610 - DNA, 24 bp, Gossypium hirsutum
aatagttagttttgtttattttag

SEQ ID NO: 20611 - DNA, 26 bp, Gossypium hirsutum
aaaatagttagttttatttattttag

SEQ ID NO: 20612 - DNA, 28 bp, Gossypium hirsutum
agcaacatgagttactcttggttaatga

SEQ ID NO: 20613 - DNA, 47 bp, Gossypium hirsutum
gataataaaagtgtgatcttctatttttcttcttctctttaatttaa

SEQ ID NO: 20614 - DNA, 20 bp, Gossypium hirsutum
ctaataaagatcaaaatttt

SEQ ID NO: 20615 - DNA, 19 bp, Gossypium hirsutum
ctaataaagatcaaatttt

SEQ ID NO: 20616 - DNA, 31 bp, Gossypium hirsutum
atcgctcatccatagttccttttaacataat

SEQ ID NO: 20617 - DNA, 35 bp, Gossypium hirsutum
gtataacatttaataaggttaggtgtgaaggttct

SEQ ID NO: 20618 - DNA, 20 bp, Gossypium hirsutum
ctgaattatccagtgattac

SEQ ID NO: 20619 - DNA, 20 bp, Gossypium hirsutum
ctgaattatccaatgattac

SEQ ID NO: 20620 - DNA, 29 bp, Gossypium hirsutum
catgtggaagtgttcatattactcaaagc

SEQ ID NO: 20621 - DNA, 26 bp, Gossypium hirsutum
cttgaccaactaaatcacccttacca

SEQ ID NO: 20622 - DNA, 13 bp, Gossypium hirsutum
accgcccaaggag

SEQ ID NO: 20623 - DNA, 13 bp, Gossypium hirsutum
accgcccagggag

SEQ ID NO: 20624 - DNA, 21 bp, Gossypium hirsutum
gattgcggccaaaagttgttg

SEQ ID NO: 20625 - DNA, 26 bp, Gossypium hirsutum
gctgatagaggatatggagagagaga

SEQ ID NO: 20626 - DNA, 24 bp, Gossypium hirsutum
ctatttctaaatatgttaaataca

SEQ ID NO: 20627 - DNA, 21 bp, Gossypium hirsutum
tttctaaatatgtcaaataca

SEQ ID NO: 20628 - DNA, 34 bp, Gossypium hirsutum
cgcatgtaactatttgattattttatcagtcaca

SEQ ID NO: 20629 - DNA, 32 bp, Gossypium hirsutum
tccaatttgatcatttttatttctcacgcttt

SEQ ID NO: 20630 - DNA, 23 bp, Gossypium hirsutum
aatgtcatactaagttactattt

SEQ ID NO: 20631 - DNA, 22 bp, Gossypium hirsutum
atgtcatactaacttactattt

SEQ ID NO: 20632 - DNA, 37 bp, Gossypium hirsutum
tcaaaatttcatgcaacaaatatattatcgtatgtgt

SEQ ID NO: 20633 - DNA, 39 bp, Gossypium hirsutum
gttgtttactattgttttgttgatattttcttcttgttt

SEQ ID NO: 20634 - DNA, 20 bp, Gossypium hirsutum
atagtaaaatggtagaaaaa

SEQ ID NO: 20635 - DNA, 26 bp, Gossypium hirsutum
aatataatagtaaaatagtagaaaaa

SEQ ID NO: 20636 - DNA, 41 bp, Gossypium hirsutum
acaaatgcctctaaaatagtaacaaaattaacaataaaact

SEQ ID NO: 20637 - DNA, 31 bp, Gossypium hirsutum
cacaactgagttagagattgctattaacaga

SEQ ID NO: 20638 - DNA, 15 bp, Gossypium hirsutum
tcatcagcgttttgc

SEQ ID NO: 20639 - DNA, 15 bp, Gossypium hirsutum
tcatcagctttttgc

SEQ ID NO: 20640 - DNA, 38 bp, Gossypium hirsutum
cgatgcgtagataagtataaatttaaatccttttacat

SEQ ID NO: 20641 - DNA, 25 bp, Gossypium hirsutum
gccttttcctggatcacatgataca

SEQ ID NO: 20642 - DNA, 20 bp, Gossypium hirsutum
cccctactaattaatttatt

SEQ ID NO: 20643 - DNA, 19 bp, Gossypium hirsutum
ccctactaattaaattatt

SEQ ID NO: 20644 - DNA, 25 bp, Gossypium hirsutum
cgatgtagcttgactcatgagcatt

SEQ ID NO: 20645 - DNA, 25 bp, Gossypium hirsutum
tcccctatttagttgttccctgaca

SEQ ID NO: 20646 - DNA, 13 bp, Gossypium hirsutum
tgcagggaacagc

SEQ ID NO: 20647 - DNA, 14 bp, Gossypium hirsutum
atgcagagaacagc

SEQ ID NO: 20648 - DNA, 43 bp, Gossypium hirsutum
agtttagtaattaatttcttatattttctttaggcagaaggaa

SEQ ID NO: 20649 - DNA, 25 bp, Gossypium hirsutum
ccccaaaacgtccaaatttcacatt

SEQ ID NO: 20650 - DNA, 21 bp, Gossypium hirsutum
tgaaagatttaacgatatcct

SEQ ID NO: 20651 - DNA, 18 bp, Gossypium hirsutum
aaagatttaacgaatcct

SEQ ID NO: 20652 - DNA, 28 bp, Gossypium hirsutum
caagcaataatgcatgtataggtgtcaa

SEQ ID NO: 20653 - DNA, 25 bp, Gossypium hirsutum
cacggttgaaaacaactacaaaacc

SEQ ID NO: 20654 - DNA, 19 bp, Gossypium hirsutum
tccttttctctatttcttc

SEQ ID NO: 20655 - DNA, 17 bp, Gossypium hirsutum
cttttctctaattcttc

SEQ ID NO: 20656 - DNA, 40 bp, Gossypium hirsutum
gctagtctcatttaggatattatagctttgattaacaaaa

SEQ ID NO: 20657 - DNA, 31 bp, Gossypium hirsutum
acagccctttatcatatgcaagatactattc

SEQ ID NO: 20658 - DNA, 25 bp, Gossypium hirsutum
agatatcttgaaatatgattactag

SEQ ID NO: 20659 - DNA, 23 bp, Gossypium hirsutum
atatcttgaaatatgataactag

SEQ ID NO: 20660 - DNA, 25 bp, Gossypium hirsutum
cagggtatggcaactgttctagatc

SEQ ID NO: 20661 - DNA, 17 bp, Gossypium hirsutum
gtcctctgccgtgcact

SEQ ID NO: 20662 - DNA, 16 bp, Gossypium hirsutum
cttgctgaaggttttt

SEQ ID NO: 20663 - DNA, 15 bp, Gossypium hirsutum
cttgctgaagttttt

SEQ ID NO: 20664 - DNA, 25 bp, Gossypium hirsutum
caatgttgccactacttttgtggat

SEQ ID NO: 20665 - DNA, 24 bp, Gossypium hirsutum
ccgttcttacagttgaccttgact

SEQ ID NO: 20666 - DNA, 17 bp, Gossypium hirsutum
aagagtagtcgaaccac

SEQ ID NO: 20667 - DNA, 16 bp, Gossypium hirsutum
agagtagtcaaaccac

SEQ ID NO: 20668 - DNA, 27 bp, Gossypium hirsutum
catgacagtagatcgatgagggatttt

SEQ ID NO: 20669 - DNA, 21 bp, Gossypium hirsutum
accagggatccccaacttctt

SEQ ID NO: 20670 - DNA, 16 bp, Gossypium hirsutum
cagctcctatctcttt

SEQ ID NO: 20671 - DNA, 16 bp, Gossypium hirsutum
cagctccaatctcttt

SEQ ID NO: 20672 - DNA, 19 bp, Gossypium hirsutum
tgccagtggctcgaacttc

SEQ ID NO: 20673 - DNA, 32 bp, Gossypium hirsutum
tgcatctatcatttgctaatatctgtccattt

SEQ ID NO: 20674 - DNA, 15 bp, Gossypium hirsutum
ctccatgaattgaac

SEQ ID NO: 20675 - DNA, 15 bp, Gossypium hirsutum
ctccaagaattgaac

SEQ ID NO: 20676 - DNA, 21 bp, Gossypium hirsutum
ctagcacgaaccatccaatgc

SEQ ID NO: 20677 - DNA, 31 bp, Gossypium hirsutum
gtatgggtttggaaaatgatgtattgtttgt

SEQ ID NO: 20678 - DNA, 23 bp, Gossypium hirsutum
ttagtgtgacatacatatgtatt

SEQ ID NO: 20679 - DNA, 19 bp, Gossypium hirsutum
tgtgacatacatatatatt

SEQ ID NO: 20680 - DNA, 24 bp, Gossypium hirsutum
ccttcgacatccctcaactttaca

SEQ ID NO: 20681 - DNA, 32 bp, Gossypium hirsutum
gtatgggtcaaattgaataattgtgtaaaggt

SEQ ID NO: 20682 - DNA, 24 bp, Gossypium hirsutum
aaagtttagtgtttatacataaag

SEQ ID NO: 20683 - DNA, 20 bp, Gossypium hirsutum
tttagtgtttacacataaag

SEQ ID NO: 20684 - DNA, 36 bp, Gossypium hirsutum
tttctttattgaaaaaatgggtaaattagctcttgt

SEQ ID NO: 20685 - DNA, 25 bp, Gossypium hirsutum
cgctttacccttcaaaacaacgaaa

SEQ ID NO: 20686 - DNA, 14 bp, Gossypium hirsutum
cccctgaccgccgc

SEQ ID NO: 20687 - DNA, 14 bp, Gossypium hirsutum
ccccagaccgccgc

SEQ ID NO: 20688 - DNA, 35 bp, Gossypium hirsutum
tcgaaaatcgaaatccataaagagaatattagtgt

SEQ ID NO: 20689 - DNA, 26 bp, Gossypium hirsutum
aacagaagaagtgaagtgaagtgaca

SEQ ID NO: 20690 - DNA, 18 bp, Gossypium hirsutum
ctgagtgaagataaatat

SEQ ID NO: 20691 - DNA, 18 bp, Gossypium hirsutum
ctgagtgaagatgaatat

SEQ ID NO: 20692 - DNA, 21 bp, Gossypium hirsutum
ctgctttttcggcgatttcct

SEQ ID NO: 20693 - DNA, 29 bp, Gossypium hirsutum
aatcttgaatgctgaaattgaagaaagct

SEQ ID NO: 20694 - DNA, 19 bp, Gossypium hirsutum
cacagtctatccgtcttaa

SEQ ID NO: 20695 - DNA, 19 bp, Gossypium hirsutum
cacagtctatccatcttaa

SEQ ID NO: 20696 - DNA, 25 bp, Gossypium hirsutum
ccttctcgcttaagcatcaatcaac

SEQ ID NO: 20697 - DNA, 39 bp, Gossypium hirsutum
acactttatattgacattttgctattaaactttacaagt

SEQ ID NO: 20698 - DNA, 17 bp, Gossypium hirsutum
caagtcctcctgaacac

SEQ ID NO: 20699 - DNA, 16 bp, Gossypium hirsutum
aagtcctcgtgaacac

SEQ ID NO: 20700 - DNA, 26 bp, Gossypium hirsutum
tcgtgttctttcgagagttagtgttt

SEQ ID NO: 20701 - DNA, 28 bp, Gossypium hirsutum
tccaaacggagacttaatagcaatgaat

SEQ ID NO: 20702 - DNA, 20 bp, Gossypium hirsutum
ttaatgtcacagcgtcacta

SEQ ID NO: 20703 - DNA, 17 bp, Gossypium hirsutum
atgtcacagcatcacta

SEQ ID NO: 20704 - DNA, 25 bp, Gossypium hirsutum
catagtgactttgggagaagcctat

SEQ ID NO: 20705 - DNA, 29 bp, Gossypium hirsutum
aaacacacccttaatggatctataaagca

SEQ ID NO: 20706 - DNA, 21 bp, Gossypium hirsutum
caaatattgtttagtaaaact

SEQ ID NO: 20707 - DNA, 20 bp, Gossypium hirsutum
aaatattgttttgtaaaact

SEQ ID NO: 20708 - DNA, 27 bp, Gossypium hirsutum
ttttcgttatgcctaggtgaatgaact

SEQ ID NO: 20709 - DNA, 45 bp, Gossypium hirsutum
tcttttttaatattttattttatttaaggaagtcaggttgtagac

SEQ ID NO: 20710 - DNA, 17 bp, Gossypium hirsutum
acacattgaccaacaca

SEQ ID NO: 20711 - DNA, 18 bp, Gossypium hirsutum
cacacattaaccaacaca

SEQ ID NO: 20712 - DNA, 31 bp, Gossypium hirsutum
ttgtcttgtaccagtaacttttcctatcatg

SEQ ID NO: 20713 - DNA, 25 bp, Gossypium hirsutum
cccagatataccccgaatgggataa

SEQ ID NO: 20714 - DNA, 15 bp, Gossypium hirsutum
cttacgccggatatc

SEQ ID NO: 20715 - DNA, 14 bp, Gossypium hirsutum
ttacgcgggatatc

SEQ ID NO: 20716 - DNA, 24 bp, Gossypium hirsutum
tccaagcagggatatcctattcca

SEQ ID NO: 20717 - DNA, 26 bp, Gossypium hirsutum
gcctactctatatgctttcccctttc

SEQ ID NO: 20718 - DNA, 18 bp, Gossypium hirsutum
cccttattttgacttttc

SEQ ID NO: 20719 - DNA, 17 bp, Gossypium hirsutum
ccttattttggcttttc

SEQ ID NO: 20720 - DNA, 29 bp, Gossypium hirsutum
gctatacactctcgtgtttgaagagataa

SEQ ID NO: 20721 - DNA, 30 bp, Gossypium hirsutum
ctcttggtacaagccttttcaagtaatttt

SEQ ID NO: 20722 - DNA, 21 bp, Gossypium hirsutum
caacttcccttttttatgtct

SEQ ID NO: 20723 - DNA, 20 bp, Gossypium hirsutum
caacttccctttttatgtct

SEQ ID NO: 20724 - DNA, 30 bp, Gossypium hirsutum
ttgtacaaacaatcttctgacctaatgtca

SEQ ID NO: 20725 - DNA, 22 bp, Gossypium hirsutum
ggatccacagcaaaagcttctg

SEQ ID NO: 20726 - DNA, 18 bp, Gossypium hirsutum
cagtgccagatatgcaga

SEQ ID NO: 20727 - DNA, 18 bp, Gossypium hirsutum
cagtgccagatttgcaga

SEQ ID NO: 20728 - DNA, 31 bp, Gossypium hirsutum
gacttagaagcaaattgtttatgctgtcttt

SEQ ID NO: 20729 - DNA, 28 bp, Gossypium hirsutum
gtacccttagaagttagccttaatcgtt

SEQ ID NO: 20730 - DNA, 22 bp, Gossypium hirsutum
tttattaggaaaaaaaacatgc

SEQ ID NO: 20731 - DNA, 21 bp, Gossypium hirsutum
tttattaggaaaaaaacatgc

SEQ ID NO: 20732 - DNA, 34 bp, Gossypium hirsutum
tgtattatcaaagtgatcattgaagggaatttca

SEQ ID NO: 20733 - DNA, 22 bp, Gossypium hirsutum
cccacaatccgatagcaacaca

SEQ ID NO: 20734 - DNA, 15 bp, Gossypium hirsutum
caggcacttgttctt

SEQ ID NO: 20735 - DNA, 15 bp, Gossypium hirsutum
caggcacttattctt

SEQ ID NO: 20736 - DNA, 25 bp, Gossypium hirsutum
actcccctttgctctgtttaatgat

SEQ ID NO: 20737 - DNA, 22 bp, Gossypium hirsutum
catgaattccgacaagcaagca

SEQ ID NO: 20738 - DNA, 18 bp, Gossypium hirsutum
taggcattttgcatgcag

SEQ ID NO: 20739 - DNA, 19 bp, Gossypium hirsutum
ctaggcattttacatgcag

SEQ ID NO: 20740 - DNA, 24 bp, Gossypium hirsutum
aatcaaggtcgaatcgatgctgta

SEQ ID NO: 20741 - DNA, 31 bp, Gossypium hirsutum
acaagtgacatattttatagaatgcgggtta

SEQ ID NO: 20742 - DNA, 19 bp, Gossypium hirsutum
ttgtagtgagtaaagaaaa

SEQ ID NO: 20743 - DNA, 19 bp, Gossypium hirsutum
ttgtagtgagtaatgaaaa

SEQ ID NO: 20744 - DNA, 34 bp, Gossypium hirsutum
cgaaagtaacttttgctaaactaccattatatcc

SEQ ID NO: 20745 - DNA, 37 bp, Gossypium hirsutum
tcgaataagaccaaactggaataaaattaacatttac

SEQ ID NO: 20746 - DNA, 26 bp, Gossypium hirsutum
tttatagttctataaataaaatcttc

SEQ ID NO: 20747 - DNA, 19 bp, Gossypium hirsutum
ttctataaatgaaatcttc

SEQ ID NO: 20748 - DNA, 34 bp, Gossypium hirsutum
tgaaattttttttcaattgcaaacaattgcaaat

SEQ ID NO: 20749 - DNA, 25 bp, Gossypium hirsutum
tcaagtggtgatggtggaatttctt

SEQ ID NO: 20750 - DNA, 18 bp, Gossypium hirsutum
atacggagagattgaatt

SEQ ID NO: 20751 - DNA, 16 bp, Gossypium hirsutum
acggagaggttgaatt

SEQ ID NO: 20752 - DNA, 19 bp, Gossypium hirsutum
gatgcatgctccccactgt

SEQ ID NO: 20753 - DNA, 28 bp, Gossypium hirsutum
tcccagaaccatcatctactttatcact

SEQ ID NO: 20754 - DNA, 15 bp, Gossypium hirsutum
caacagtgccttctt

SEQ ID NO: 20755 - DNA, 17 bp, Gossypium hirsutum
atcaacagtcccttctt

SEQ ID NO: 20756 - DNA, 23 bp, Gossypium hirsutum
gctgatccgtcatgttcctatgg

SEQ ID NO: 20757 - DNA, 41 bp, Gossypium hirsutum
gcctaatcaaacctttaacgtttaatatatttaagatgtac

SEQ ID NO: 20758 - DNA, 17 bp, Gossypium hirsutum
aatgtctgacattttac

SEQ ID NO: 20759 - DNA, 18 bp, Gossypium hirsutum
taatgtctgactttttac

SEQ ID NO: 20760 - DNA, 24 bp, Gossypium hirsutum
ccaagctcggctcataacttactt

SEQ ID NO: 20761 - DNA, 25 bp, Gossypium hirsutum
ccacttgcttgaatttgacctagct

SEQ ID NO: 20762 - DNA, 16 bp, Gossypium hirsutum
cctctgtgagcatcag

SEQ ID NO: 20763 - DNA, 16 bp, Gossypium hirsutum
cctctgtgaacatcag

SEQ ID NO: 20764 - DNA, 23 bp, Gossypium hirsutum
tcactccgctcccaaatttgatt

SEQ ID NO: 20765 - DNA, 31 bp, Gossypium hirsutum
tcacccaattatgccttttgttatattttgg

SEQ ID NO: 20766 - DNA, 16 bp, Gossypium hirsutum
caaaattggaaaaatt

SEQ ID NO: 20767 - DNA, 17 bp, Gossypium hirsutum
acaaaattgaaaaaatt

SEQ ID NO: 20768 - DNA, 30 bp, Gossypium hirsutum
cccatggataggtttacaaaagagtaacta

SEQ ID NO: 20769 - DNA, 26 bp, Gossypium hirsutum
gcaaacgttttggataatgccatttt

SEQ ID NO: 20770 - DNA, 20 bp, Gossypium hirsutum
atcgagcaacatattggata

SEQ ID NO: 20771 - DNA, 20 bp, Gossypium hirsutum
atcgagcaacatattagata

SEQ ID NO: 20772 - DNA, 24 bp, Gossypium hirsutum
cggagttctcggtcctaatctttt

SEQ ID NO: 20773 - DNA, 29 bp, Gossypium hirsutum
cgctttcatttacttcaacttctcaggta

SEQ ID NO: 20774 - DNA, 19 bp, Gossypium hirsutum
ataaatttgcaaacaattc

SEQ ID NO: 20775 - DNA, 21 bp, Gossypium hirsutum
aaataaatttgaaaacaattc

SEQ ID NO: 20776 - DNA, 25 bp, Gossypium hirsutum
gggacaaggagagatcaaagaaagt

SEQ ID NO: 20777 - DNA, 22 bp, Gossypium hirsutum
catgggttctagtgcgttgaag

SEQ ID NO: 20778 - DNA, 18 bp, Gossypium hirsutum
cttccccaacttataaat

SEQ ID NO: 20779 - DNA, 16 bp, Gossypium hirsutum
tccccaacctataaat

SEQ ID NO: 20780 - DNA, 25 bp, Gossypium hirsutum
acatggacagtttgaccctttgaaa

SEQ ID NO: 20781 - DNA, 43 bp, Gossypium hirsutum
tcggataaaaacacaaaaaataataaaacaaatatttctcaac

SEQ ID NO: 20782 - DNA, 15 bp, Gossypium hirsutum
atgacagcaaaacaa

SEQ ID NO: 20783 - DNA, 19 bp, Gossypium hirsutum
ttaaatgacagtaaaacaa

SEQ ID NO: 20784 - DNA, 27 bp, Gossypium hirsutum
actctgttgttttgttgttgcttttct

SEQ ID NO: 20785 - DNA, 29 bp, Gossypium hirsutum
actgcaaagtattgtaggctataaatgct

SEQ ID NO: 20786 - DNA, 21 bp, Gossypium hirsutum
cataatgaagcaaatttaaaa

SEQ ID NO: 20787 - DNA, 21 bp, Gossypium hirsutum
cataatgaagcaaatataaaa

SEQ ID NO: 20788 - DNA, 23 bp, Gossypium hirsutum
acttggaagggcgtaatcgatac

SEQ ID NO: 20789 - DNA, 26 bp, Gossypium hirsutum
tttttgcttaccgtggacttgttttt

SEQ ID NO: 20790 - DNA, 17 bp, Gossypium hirsutum
actgatgtaaaataaag

SEQ ID NO: 20791 - DNA, 17 bp, Gossypium hirsutum
actgatgtaagataaag

SEQ ID NO: 20792 - DNA, 32 bp, Gossypium hirsutum
gagggtaagtcggaattttagctataatgtat

SEQ ID NO: 20793 - DNA, 24 bp, Gossypium hirsutum
ttggacccaaaatcagggcataat

SEQ ID NO: 20794 - DNA, 19 bp, Gossypium hirsutum
cctatactaacagcttcct

SEQ ID NO: 20795 - DNA, 20 bp, Gossypium hirsutum
acctatactaacatcttcct

SEQ ID NO: 20796 - DNA, 25 bp, Gossypium hirsutum
ctgctttgtgttgcattgaatcaaa

SEQ ID NO: 20797 - DNA, 25 bp, Gossypium hirsutum
ccagtcagctcaagagaaacatgta

SEQ ID NO: 20798 - DNA, 18 bp, Gossypium hirsutum
accatcttatcgttcctc

SEQ ID NO: 20799 - DNA, 18 bp, Gossypium hirsutum
accatcttatctttcctc

SEQ ID NO: 20800 - DNA, 42 bp, Gossypium hirsutum
ctggcttttctattgaattttagttatcatattatacaagtt

SEQ ID NO: 20801 - DNA, 28 bp, Gossypium hirsutum
cctctttcatggttttaggaatggtcta

SEQ ID NO: 20802 - DNA, 20 bp, Gossypium hirsutum
aagactaagttttaaaaatt

SEQ ID NO: 20803 - DNA, 21 bp, Gossypium hirsutum
aaagactaaattttaaaaatt

SEQ ID NO: 20804 - DNA, 33 bp, Gossypium hirsutum
aaaaagattctgaaagaaattagttgcttggaa

SEQ ID NO: 20805 - DNA, 29 bp, Gossypium hirsutum
cattgtttcttgcctgagttttatcatct

SEQ ID NO: 20806 - DNA, 18 bp, Gossypium hirsutum
tttaacacccactccttc

SEQ ID NO: 20807 - DNA, 14 bp, Gossypium hirsutum
acacccagtccttc

SEQ ID NO: 20808 - DNA, 41 bp, Gossypium hirsutum
aattatattttaaagaataaagtaacatgggtgctcatttt

SEQ ID NO: 20809 - DNA, 26 bp, Gossypium hirsutum
ttttcctcctttcttccaacgaatca

SEQ ID NO: 20810 - DNA, 18 bp, Gossypium hirsutum
atcaacctggagtaatga

SEQ ID NO: 20811 - DNA, 16 bp, Gossypium hirsutum
caacctggaataatga

SEQ ID NO: 20812 - DNA, 25 bp, Gossypium hirsutum
cttcacctcctcatttccatcacaa

SEQ ID NO: 20813 - DNA, 45 bp, Gossypium hirsutum
actttgttatacatagtcaattttacatttgtaagtcatttattt

SEQ ID NO: 20814 - DNA, 22 bp, Gossypium hirsutum
tttagtgttatacgaagttaaa

SEQ ID NO: 20815 - DNA, 22 bp, Gossypium hirsutum
tttagtgttatacgtagttaaa

SEQ ID NO: 20816 - DNA, 25 bp, Gossypium hirsutum
ggctagtcatacactcatgcatact

SEQ ID NO: 20817 - DNA, 46 bp, Gossypium hirsutum
gttgatttaatccttatactttaatttagtcattcttaatttcagt

SEQ ID NO: 20818 - DNA, 22 bp, Gossypium hirsutum
ataataagctagcatggtatta

SEQ ID NO: 20819 - DNA, 19 bp, Gossypium hirsutum
ataagctagcatgatatta

SEQ ID NO: 20820 - DNA, 39 bp, Gossypium hirsutum
ctgatccattaattgaatttttagcgaataatctatgaa

SEQ ID NO: 20821 - DNA, 25 bp, Gossypium hirsutum
cacagcacactctagcttttgtttt

SEQ ID NO: 20822 - DNA, 20 bp, Gossypium hirsutum
ccattatgagtaacaactaa

SEQ ID NO: 20823 - DNA, 19 bp, Gossypium hirsutum
cattatgagttacaactaa

SEQ ID NO: 20824 - DNA, 29 bp, Gossypium hirsutum
ccttttttacaaagtagttgcatgaacca

SEQ ID NO: 20825 - DNA, 22 bp, Gossypium hirsutum
ggcagcagatttctggaactca

SEQ ID NO: 20826 - DNA, 21 bp, Gossypium hirsutum
ctattattcttaaccaaaggc

SEQ ID NO: 20827 - DNA, 15 bp, Gossypium hirsutum
ttcttagccaaaggc

SEQ ID NO: 20828 - DNA, 25 bp, Gossypium hirsutum
tgaagaagtctgaatctggccattt

SEQ ID NO: 20829 - DNA, 28 bp, Gossypium hirsutum
ttgaactgaaacaaggctatatgactgt

SEQ ID NO: 20830 - DNA, 17 bp, Gossypium hirsutum
ctaagttgtacaaattc

SEQ ID NO: 20831 - DNA, 17 bp, Gossypium hirsutum
ctaagttgtaaaaattc

SEQ ID NO: 20832 - DNA, 25 bp, Gossypium hirsutum
acttctgttggtacacattcacgaa

SEQ ID NO: 20833 - DNA, 23 bp, Gossypium hirsutum
accgctaaaggtcgtgagctata

SEQ ID NO: 20834 - DNA, 16 bp, Gossypium hirsutum
catttagcggcgcttt

SEQ ID NO: 20835 - DNA, 17 bp, Gossypium hirsutum
acatttagcagcgcttt

SEQ ID NO: 20836 - DNA, 24 bp, Gossypium hirsutum
acttttcccacaaacgccactata

SEQ ID NO: 20837 - DNA, 29 bp, Gossypium hirsutum
agccggaatatagtttttacatccaagtt

SEQ ID NO: 20838 - DNA, 20 bp, Gossypium hirsutum
cttggtaatacttttttttc

SEQ ID NO: 20839 - DNA, 19 bp, Gossypium hirsutum
cttggtaatactttttttc

SEQ ID NO: 20840 - DNA, 21 bp, Gossypium hirsutum
ccgagtccgatgatccaaacg

SEQ ID NO: 20841 - DNA, 25 bp, Gossypium hirsutum
gaaggttttgtgtgccctaaattgt

SEQ ID NO: 20842 - DNA, 16 bp, Gossypium hirsutum
ccggttcttaaagagg

SEQ ID NO: 20843 - DNA, 15 bp, Gossypium hirsutum
cggttcttgaagagg

SEQ ID NO: 20844 - DNA, 25 bp, Gossypium hirsutum
gttttggtggtgctaatgctagttt

SEQ ID NO: 20845 - DNA, 37 bp, Gossypium hirsutum
aaatattttagtcactttttgtcattagatgagtgtc

SEQ ID NO: 20846 - DNA, 23 bp, Gossypium hirsutum
attgaattctaaaaaaaaatcaa

SEQ ID NO: 20847 - DNA, 21 bp, Gossypium hirsutum
ttgaattctaaaaaaaatcaa

SEQ ID NO: 20848 - DNA, 32 bp, Gossypium hirsutum
tgatggattttgtaaattttgagggctaaatg

SEQ ID NO: 20849 - DNA, 27 bp, Gossypium hirsutum
tcgactagatccaaccctaattaccaa

SEQ ID NO: 20850 - DNA, 16 bp, Gossypium hirsutum
cttggtccaacacaac

SEQ ID NO: 20851 - DNA, 15 bp, Gossypium hirsutum
ttggtccagcacaac

SEQ ID NO: 20852 - DNA, 32 bp, Gossypium hirsutum
aaagtaaagcttgactgccagttaaataaaat

SEQ ID NO: 20853 - DNA, 18 bp, Gossypium hirsutum
gatgccagatcgggccaa

SEQ ID NO: 20854 - DNA, 18 bp, Gossypium hirsutum
aaagaagtgagaggccta

SEQ ID NO: 20855 - DNA, 19 bp, Gossypium hirsutum
caaagaagtgataggccta

SEQ ID NO: 20856 - DNA, 23 bp, Gossypium hirsutum
caaagcctttcagagtgattggg

SEQ ID NO: 20857 - DNA, 26 bp, Gossypium hirsutum
tggtatcatgttgctcgattttggat

SEQ ID NO: 20858 - DNA, 21 bp, Gossypium hirsutum
ccatatgaatatacagtcttc

SEQ ID NO: 20859 - DNA, 20 bp, Gossypium hirsutum
catatgaatatagagtcttc

SEQ ID NO: 20860 - DNA, 35 bp, Gossypium hirsutum
tgaaggcaagagttgaatatgagtatacttaattc

SEQ ID NO: 20861 - DNA, 27 bp, Gossypium hirsutum
gttactattccagattcgttccgatga

SEQ ID NO: 20862 - DNA, 21 bp, Gossypium hirsutum
atagtaacggtacagagagta

SEQ ID NO: 20863 - DNA, 21 bp, Gossypium hirsutum
atagtaacggtacacagagta

SEQ ID NO: 20864 - DNA, 24 bp, Gossypium hirsutum
cagagccggaatacactgtaacag

SEQ ID NO: 20865 - DNA, 23 bp, Gossypium hirsutum
ttacgagtttggtgcctcagaaa

SEQ ID NO: 20866 - DNA, 17 bp, Gossypium hirsutum
tcccctactcttccacc

SEQ ID NO: 20867 - DNA, 17 bp, Gossypium hirsutum
tcccctacttttccacc

SEQ ID NO: 20868 - DNA, 25 bp, Gossypium hirsutum
gcctgttttgcttgaattgggaata

SEQ ID NO: 20869 - DNA, 28 bp, Gossypium hirsutum
ctgacaattgcatgctatttggtttaga

SEQ ID NO: 20870 - DNA, 16 bp, Gossypium hirsutum
taaagcaagagaaaac

SEQ ID NO: 20871 - DNA, 14 bp, Gossypium hirsutum
aagcaacagaaaac

SEQ ID NO: 20872 - DNA, 36 bp, Gossypium hirsutum
gaaaaacagttaaagttaaaaagacttgtcaaaact

SEQ ID NO: 20873 - DNA, 21 bp, Gossypium hirsutum
gcaagagtcacgtgggaagat

SEQ ID NO: 20874 - DNA, 20 bp, Gossypium hirsutum
tctaaaaatatgaaaagtcc

SEQ ID NO: 20875 - DNA, 20 bp, Gossypium hirsutum
tctaaaaatatgagaagtcc

SEQ ID NO: 20876 - DNA, 26 bp, Gossypium hirsutum
gtcttcaacttcgcaacaaaacattc

SEQ ID NO: 20877 - DNA, 27 bp, Gossypium hirsutum
tgataccgtactttgtctagggagaaa

SEQ ID NO: 20878 - DNA, 17 bp, Gossypium hirsutum
ctttcaagcaaaatgat

SEQ ID NO: 20879 - DNA, 17 bp, Gossypium hirsutum
ctttcaagcataatgat

SEQ ID NO: 20880 - DNA, 24 bp, Gossypium hirsutum
ggtcaccaattcctttaccctgtt

SEQ ID NO: 20881 - DNA, 27 bp, Gossypium hirsutum
caacacaaatcccttcatttcaaaacc

SEQ ID NO: 20882 - DNA, 18 bp, Gossypium hirsutum
caagatagcaccctcatt

SEQ ID NO: 20883 - DNA, 17 bp, Gossypium hirsutum
aagatagcaccgtcatt

SEQ ID NO: 20884 - DNA, 25 bp, Gossypium hirsutum
ttttgagacccttgaagcataagct

SEQ ID NO: 20885 - DNA, 32 bp, Gossypium hirsutum
ttcaacattatacttcatgacctttcttacgt

SEQ ID NO: 20886 - DNA, 18 bp, Gossypium hirsutum
tgaaaggatgatattgac

SEQ ID NO: 20887 - DNA, 16 bp, Gossypium hirsutum
aaaggatgaaattgac

SEQ ID NO: 20888 - DNA, 31 bp, Gossypium hirsutum
tctagtttacatggtctttttgttgacttct

SEQ ID NO: 20889 - DNA, 25 bp, Gossypium hirsutum
actaagccttgcatggttttttgtt

SEQ ID NO: 20890 - DNA, 20 bp, Gossypium hirsutum
ctttttagatggccccagcc

SEQ ID NO: 20891 - DNA, 19 bp, Gossypium hirsutum
ctttttagatggcccagcc

SEQ ID NO: 20892 - DNA, 31 bp, Gossypium hirsutum
aagggctgtaaaaggaaaatttccattttag

SEQ ID NO: 20893 - DNA, 25 bp, Gossypium hirsutum
catcggtggctgttaactatcatca

SEQ ID NO: 20894 - DNA, 17 bp, Gossypium hirsutum
caggagcatcatggaat

SEQ ID NO: 20895 - DNA, 16 bp, Gossypium hirsutum
aggagcatcatagaat

SEQ ID NO: 20896 - DNA, 25 bp, Gossypium hirsutum
gcagaataagatggacatgcatgac

SEQ ID NO: 20897 - DNA, 46 bp, Gossypium hirsutum
tgttgtcataacaagtaattaatctagcaatatcataataatctta

SEQ ID NO: 20898 - DNA, 17 bp, Gossypium hirsutum
caactcaaggtaccaac

SEQ ID NO: 20899 - DNA, 17 bp, Gossypium hirsutum
caactcaagataccaac

SEQ ID NO: 20900 - DNA, 28 bp, Gossypium hirsutum
acatttatagactcagtgtgcaatcagg

SEQ ID NO: 20901 - DNA, 22 bp, Gossypium hirsutum
ttgaggagttgtgggagtttgg

SEQ ID NO: 20902 - DNA, 16 bp, Gossypium hirsutum
ttcccacatgattgac

SEQ ID NO: 20903 - DNA, 14 bp, Gossypium hirsutum
cccacctgattgac

SEQ ID NO: 20904 - DNA, 30 bp, Gossypium hirsutum
gctccagtttctttcaaatcttaactcaat

SEQ ID NO: 20905 - DNA, 23 bp, Gossypium hirsutum
gacacaaaatacaagggcgactt

SEQ ID NO: 20906 - DNA, 21 bp, Gossypium hirsutum
ccttaaaatataacgattctc

SEQ ID NO: 20907 - DNA, 21 bp, Gossypium hirsutum
ccttaaaatataaagattctc

SEQ ID NO: 20908 - DNA, 26 bp, Gossypium hirsutum
ccaaccaaacaaaatagttgcgatct

SEQ ID NO: 20909 - DNA, 25 bp, Gossypium hirsutum
tgcaggaaaagtttaccacaatcct

SEQ ID NO: 20910 - DNA, 20 bp, Gossypium hirsutum
ctatttgtgaccatcactac

SEQ ID NO: 20911 - DNA, 17 bp, Gossypium hirsutum
tttgtgaccgtcactac

SEQ ID NO: 20912 - DNA, 31 bp, Gossypium hirsutum
gcggaaaatatatggtaaaatggtcaaagaa

SEQ ID NO: 20913 - DNA, 25 bp, Gossypium hirsutum
gtggcctttgcagtatcaaaatgtt

SEQ ID NO: 20914 - DNA, 24 bp, Gossypium hirsutum
caatatacatactttttcataatc

SEQ ID NO: 20915 - DNA, 18 bp, Gossypium hirsutum
acatactttgtcataatc

SEQ ID NO: 20916 - DNA, 27 bp, Gossypium hirsutum
cagacaattgaactaagggcacttaga

SEQ ID NO: 20917 - DNA, 22 bp, Gossypium hirsutum
tcaattggaactttgggaggca

SEQ ID NO: 20918 - DNA, 15 bp, Gossypium hirsutum
ccacccgttggctaa

SEQ ID NO: 20919 - DNA, 14 bp, Gossypium hirsutum
cacccgctggctaa

SEQ ID NO: 20920 - DNA, 19 bp, Gossypium hirsutum
cccctcggcgaagtcaaaa

SEQ ID NO: 20921 - DNA, 26 bp, Gossypium hirsutum
cgttagaatcctacagcatacgaagt

SEQ ID NO: 20922 - DNA, 14 bp, Gossypium hirsutum
cgggctgtgttaat

SEQ ID NO: 20923 - DNA, 17 bp, Gossypium hirsutum
atacgggctatgttaat

SEQ ID NO: 20924 - DNA, 25 bp, Gossypium hirsutum
cactactaggaaacaaacacgcttg

SEQ ID NO: 20925 - DNA, 25 bp, Gossypium hirsutum
ccctcataccttgttggaatccatt

SEQ ID NO: 20926 - DNA, 13 bp, Gossypium hirsutum
cagcagaggcttt

SEQ ID NO: 20927 - DNA, 14 bp, Gossypium hirsutum
ccagcaaaggcttt

SEQ ID NO: 20928 - DNA, 28 bp, Gossypium hirsutum
gactcttttcagcatctacttcttctct

SEQ ID NO: 20929 - DNA, 38 bp, Gossypium hirsutum
actaaacatttaaaaatgagaggaaaggttaaagaaat

SEQ ID NO: 20930 - DNA, 23 bp, Gossypium hirsutum
ataatatcattggatgttttatt

SEQ ID NO: 20931 - DNA, 23 bp, Gossypium hirsutum
ataatatcattggatattttatt

SEQ ID NO: 20932 - DNA, 30 bp, Gossypium hirsutum
gtctctagaggcatcttgaactatttacaa

SEQ ID NO: 20933 - DNA, 26 bp, Gossypium hirsutum
tggcttcaaacttgaacaacagtaga

SEQ ID NO: 20934 - DNA, 23 bp, Gossypium hirsutum
tactcaattaattacgataagag

SEQ ID NO: 20935 - DNA, 23 bp, Gossypium hirsutum
tactcaattaattacaataagag

SEQ ID NO: 20936 - DNA, 24 bp, Gossypium hirsutum
tctctgaggttggtgacttgaaga

SEQ ID NO: 20937 - DNA, 30 bp, Gossypium hirsutum
tcggtatttattgaatgatgtaaacaggct

SEQ ID NO: 20938 - DNA, 21 bp, Gossypium hirsutum
caatcttcaatataggtttct

SEQ ID NO: 20939 - DNA, 21 bp, Gossypium hirsutum
caatcttcaatataagtttct

SEQ ID NO: 20940 - DNA, 21 bp, Gossypium hirsutum
gctcgtggtgatttggtttcg

SEQ ID NO: 20941 - DNA, 25 bp, Gossypium hirsutum
ctgtgcctactgtccagataaatca

SEQ ID NO: 20942 - DNA, 17 bp, Gossypium hirsutum
ttcttcggtacagcatc

SEQ ID NO: 20943 - DNA, 21 bp, Gossypium hirsutum
tttattcttcgatacagcatc

SEQ ID NO: 20944 - DNA, 23 bp, Gossypium hirsutum
tgtgcagtggctgaaaagtatgt

SEQ ID NO: 20945 - DNA, 25 bp, Gossypium hirsutum
ccagtgaagcgaatttgtttgcatt

SEQ ID NO: 20946 - DNA, 17 bp, Gossypium hirsutum
ctgcataaaaaaatgca

SEQ ID NO: 20947 - DNA, 16 bp, Gossypium hirsutum
ctgcataaaaaatgca

SEQ ID NO: 20948 - DNA, 25 bp, Gossypium hirsutum
gctttacatggcgcgttatagtttc

SEQ ID NO: 20949 - DNA, 26 bp, Gossypium hirsutum
gtggttttgtagattctgagggagaa

SEQ ID NO: 20950 - DNA, 18 bp, Gossypium hirsutum
accaagttcagtaagtat

SEQ ID NO: 20951 - DNA, 19 bp, Gossypium hirsutum
caccaagtttagtaagtat

SEQ ID NO: 20952 - DNA, 24 bp, Gossypium hirsutum
ggcccaaaaatgttacctctcgta

SEQ ID NO: 20953 - DNA, 26 bp, Gossypium hirsutum
tccatgccaaataattgggattacct

SEQ ID NO: 20954 - DNA, 16 bp, Gossypium hirsutum
tcaaccccattgtctc

SEQ ID NO: 20955 - DNA, 15 bp, Gossypium hirsutum
caaccccgttgtctc

SEQ ID NO: 20956 - DNA, 23 bp, Gossypium hirsutum
tgctgaccatgatatctgttgct

SEQ ID NO: 20957 - DNA, 25 bp, Gossypium hirsutum
cacggatttttgcgttagtcactta

SEQ ID NO: 20958 - DNA, 19 bp, Gossypium hirsutum
caagcctttttttgtttat

SEQ ID NO: 20959 - DNA, 18 bp, Gossypium hirsutum
caagccttttttgtttat

SEQ ID NO: 20960 - DNA, 44 bp, Gossypium hirsutum
caaagtatatgaacactatggacataattaaaacttttttacta

SEQ ID NO: 20961 - DNA, 26 bp, Gossypium hirsutum
tgggtgttccatctaagatctaacca

SEQ ID NO: 20962 - DNA, 16 bp, Gossypium hirsutum
ccagaaaaaaaagctg

SEQ ID NO: 20963 - DNA, 15 bp, Gossypium hirsutum
cagaaaaaaaatctg

SEQ ID NO: 20964 - DNA, 26 bp, Gossypium hirsutum
catactccaatttcttgagatcccca

SEQ ID NO: 20965 - DNA, 34 bp, Gossypium hirsutum
ccttatgagtcttctgttcctaaaagtttaaaat

SEQ ID NO: 20966 - DNA, 18 bp, Gossypium hirsutum
caagggtcataggatgtt

SEQ ID NO: 20967 - DNA, 17 bp, Gossypium hirsutum
aagggtcataagatgtt

SEQ ID NO: 20968 - DNA, 23 bp, Gossypium hirsutum
caagatgcaagcttcacaaaggt

SEQ ID NO: 20969 - DNA, 28 bp, Gossypium hirsutum
gggattcctcataatcatccatagacaa

SEQ ID NO: 20970 - DNA, 16 bp, Gossypium hirsutum
atggtttcgtcttttg

SEQ ID NO: 20971 - DNA, 16 bp, Gossypium hirsutum
atggtttcatcttttg

SEQ ID NO: 20972 - DNA, 25 bp, Gossypium hirsutum
cctgctctttgctcattttggttat

SEQ ID NO: 20973 - DNA, 26 bp, Gossypium hirsutum
ttgaaaagaaaagggaaaaggctgtc

SEQ ID NO: 20974 - DNA, 17 bp, Gossypium hirsutum
ccttgcttcttcttttt

SEQ ID NO: 20975 - DNA, 16 bp, Gossypium hirsutum
ccttgcttcttttttt

SEQ ID NO: 20976 - DNA, 24 bp, Gossypium hirsutum
ccctccctctctacacatttcctt

SEQ ID NO: 20977 - DNA, 25 bp, Gossypium hirsutum
ggtggtttgaagggttaagagagtt

SEQ ID NO: 20978 - DNA, 18 bp, Gossypium hirsutum
caaagggcttctcgatca

SEQ ID NO: 20979 - DNA, 16 bp, Gossypium hirsutum
aagggcttctcaatca

SEQ ID NO: 20980 - DNA, 25 bp, Gossypium hirsutum
ccatgctccagctagctactatctt

SEQ ID NO: 20981 - DNA, 36 bp, Gossypium hirsutum
gtttatgtcaatggaaatacaaaataacagaagaca

SEQ ID NO: 20982 - DNA, 15 bp, Gossypium hirsutum
ttccctgctgttgcc

SEQ ID NO: 20983 - DNA, 16 bp, Gossypium hirsutum
attccctgatgttgcc

SEQ ID NO: 20984 - DNA, 27 bp, Gossypium hirsutum
atttttctttacttgcattcgtgccat

SEQ ID NO: 20985 - DNA, 25 bp, Gossypium hirsutum
cgtgtgtttgatgagggcataacta

SEQ ID NO: 20986 - DNA, 15 bp, Gossypium hirsutum
cacggtcgtatcttg

SEQ ID NO: 20987 - DNA, 14 bp, Gossypium hirsutum
acggtcatatcttg

SEQ ID NO: 20988 - DNA, 18 bp, Gossypium hirsutum
gccacaccccaactacca

SEQ ID NO: 20989 - DNA, 21 bp, Gossypium hirsutum
cggcaattctctctgggttgt

SEQ ID NO: 20990 - DNA, 16 bp, Gossypium hirsutum
tcttgcatccactgcc

SEQ ID NO: 20991 - DNA, 14 bp, Gossypium hirsutum
ttgcatccgctgcc

SEQ ID NO: 20992 - DNA, 27 bp, Gossypium hirsutum
ccaaaatatgcagacaatgaccgataa

SEQ ID NO: 20993 - DNA, 29 bp, Gossypium hirsutum
aggtacgttgaaaaacaaacacatcattt

SEQ ID NO: 20994 - DNA, 18 bp, Gossypium hirsutum
caagccatttttcaagcg

SEQ ID NO: 20995 - DNA, 17 bp, Gossypium hirsutum
caagccattttcaagcg

SEQ ID NO: 20996 - DNA, 28 bp, Gossypium hirsutum
cagccattcatacatgcatatgtacatg

SEQ ID NO: 20997 - DNA, 34 bp, Gossypium hirsutum
gaggttacaaataaaatgacgtagactattctgt

SEQ ID NO: 20998 - DNA, 16 bp, Gossypium hirsutum
ccgtatcactaatctt

SEQ ID NO: 20999 - DNA, 16 bp, Gossypium hirsutum
ccgtatcattaatctt

SEQ ID NO: 21000 - DNA, 25 bp, Gossypium hirsutum
gcagaagaattttcacagccaaagt

SEQ ID NO: 21001 - DNA, 35 bp, Gossypium hirsutum
gcatcttccattattattcttatttagggtaagca

SEQ ID NO: 21002 - DNA, 17 bp, Gossypium hirsutum
cgagttattcgaattat

SEQ ID NO: 21003 - DNA, 18 bp, Gossypium hirsutum
tcgagttatttgaattat

SEQ ID NO: 21004 - DNA, 25 bp, Gossypium hirsutum
cagataatgatgggatgggaccatt

SEQ ID NO: 21005 - DNA, 21 bp, Gossypium hirsutum
gaaggaccggtttgctctttg

SEQ ID NO: 21006 - DNA, 19 bp, Gossypium hirsutum
tctaacgtacagggactaa

SEQ ID NO: 21007 - DNA, 20 bp, Gossypium hirsutum
atctaacgtacatggactaa

SEQ ID NO: 21008 - DNA, 25 bp, Gossypium hirsutum
gccatattgcattttgctccctcta

SEQ ID NO: 21009 - DNA, 25 bp, Gossypium hirsutum
tggtggagagggattaaatcgacta

SEQ ID NO: 21010 - DNA, 15 bp, Gossypium hirsutum
ctccgcccttcacac

SEQ ID NO: 21011 - DNA, 13 bp, Gossypium hirsutum
ccgccgttcacac

SEQ ID NO: 21012 - DNA, 24 bp, Gossypium hirsutum
aatttcaggtggtccttagcaaca

SEQ ID NO: 21013 - DNA, 25 bp, Gossypium hirsutum
gcgaataaccacatcccaatcattt

SEQ ID NO: 21014 - DNA, 20 bp, Gossypium hirsutum
taacaacatagtgtaagttt

SEQ ID NO: 21015 - DNA, 17 bp, Gossypium hirsutum
caacatagggtaagttt

SEQ ID NO: 21016 - DNA, 27 bp, Gossypium hirsutum
cactacagcaactaatttaggcaggat

SEQ ID NO: 21017 - DNA, 27 bp, Gossypium hirsutum
caatgaaggagatgtgttcttgtttcc

SEQ ID NO: 21018 - DNA, 17 bp, Gossypium hirsutum
ccatttttgcatgaacg

SEQ ID NO: 21019 - DNA, 17 bp, Gossypium hirsutum
ccatttttgcttgaacg

SEQ ID NO: 21020 - DNA, 19 bp, Gossypium hirsutum
aatggccggctcataacca

SEQ ID NO: 21021 - DNA, 29 bp, Gossypium hirsutum
cacatgcaatatagcttgaattagatgca

SEQ ID NO: 21022 - DNA, 19 bp, Gossypium hirsutum
aaaacatctgagtggatca

SEQ ID NO: 21023 - DNA, 16 bp, Gossypium hirsutum
acatctgggtggatca

SEQ ID NO: 21024 - DNA, 25 bp, Gossypium hirsutum
gatccttccgagcataagattgtct

SEQ ID NO: 21025 - DNA, 25 bp, Gossypium hirsutum
cggttagctatctttacccgttcaa

SEQ ID NO: 21026 - DNA, 18 bp, Gossypium hirsutum
caaggtaacttattatgc

SEQ ID NO: 21027 - DNA, 18 bp, Gossypium hirsutum
caaggtaacttgttatgc

SEQ ID NO: 21028 - DNA, 23 bp, Gossypium hirsutum
tcagaaagaaacagaggttgcga

SEQ ID NO: 21029 - DNA, 30 bp, Gossypium hirsutum
actaataacaataatgatgccaactgaggt

SEQ ID NO: 21030 - DNA, 16 bp, Gossypium hirsutum
ttaaccgcctaatatc

SEQ ID NO: 21031 - DNA, 17 bp, Gossypium hirsutum
cttaacctcctaatatc

SEQ ID NO: 21032 - DNA, 35 bp, Gossypium hirsutum
tcgttttagtgaaaatacttctccatttgaaaaat

SEQ ID NO: 21033 - DNA, 25 bp, Gossypium hirsutum
agaaaggctgtgaaggtgaaaatga

SEQ ID NO: 21034 - DNA, 21 bp, Gossypium hirsutum
ttttattaaaccgcacaccat

SEQ ID NO: 21035 - DNA, 22 bp, Gossypium hirsutum
attttattaaaccccacaccat

SEQ ID NO: 21036 - DNA, 30 bp, Gossypium hirsutum
ctaccactgataattcaatccttcttctct

SEQ ID NO: 21037 - DNA, 20 bp, Gossypium hirsutum
ccgtgtggaccaaggacatg

SEQ ID NO: 21038 - DNA, 13 bp, Gossypium hirsutum
cggcctgctctca

SEQ ID NO: 21039 - DNA, 14 bp, Gossypium hirsutum
acggcctactctca

SEQ ID NO: 21040 - DNA, 25 bp, Gossypium hirsutum
gctgtgtcagccctatactcaaatt

SEQ ID NO: 21041 - DNA, 27 bp, Gossypium hirsutum
ctttcccttactcagtttatccatcct

SEQ ID NO: 21042 - DNA, 25 bp, Gossypium hirsutum
atatcattttttttcctttataatc

SEQ ID NO: 21043 - DNA, 21 bp, Gossypium hirsutum
tcatttttttcctttataatc

SEQ ID NO: 21044 - DNA, 27 bp, Gossypium hirsutum
gtcatcaatctgtgcttgaatgaagtt

SEQ ID NO: 21045 - DNA, 25 bp, Gossypium hirsutum
gataacaaagtcaggatcggaaggt

SEQ ID NO: 21046 - DNA, 17 bp, Gossypium hirsutum
aatcaggcctattgttg

SEQ ID NO: 21047 - DNA, 17 bp, Gossypium hirsutum
aatcaggcctcttgttg

SEQ ID NO: 21048 - DNA, 24 bp, Gossypium hirsutum
gaggagtaccattccccaacaaat

SEQ ID NO: 21049 - DNA, 27 bp, Gossypium hirsutum
cattcacccaatagcctctatgtaaca

SEQ ID NO: 21050 - DNA, 18 bp, Gossypium hirsutum
cgcatttgttgtcaccga

SEQ ID NO: 21051 - DNA, 19 bp, Gossypium hirsutum
ccgcatttgttatcaccga

SEQ ID NO: 21052 - DNA, 34 bp, Gossypium hirsutum
ccgtacatcttctaattttatccttacaaactca

SEQ ID NO: 21053 - DNA, 25 bp, Gossypium hirsutum
gggttgaacctcacactattgagat

SEQ ID NO: 21054 - DNA, 19 bp, Gossypium hirsutum
ctgctaattttagactctg

SEQ ID NO: 21055 - DNA, 18 bp, Gossypium hirsutum
tgctaattttggactctg

SEQ ID NO: 21056 - DNA, 26 bp, Gossypium hirsutum
gaactagacatccgataaaggttgct

SEQ ID NO: 21057 - DNA, 32 bp, Gossypium hirsutum
ctgtaagtctgctcttatgaagttctctattt

SEQ ID NO: 21058 - DNA, 15 bp, Gossypium hirsutum
cccccttacgttttt

SEQ ID NO: 21059 - DNA, 15 bp, Gossypium hirsutum
cccccttatgttttt

SEQ ID NO: 21060 - DNA, 27 bp, Gossypium hirsutum
gagatatcaacttgagttcctgctaca

SEQ ID NO: 21061 - DNA, 24 bp, Gossypium hirsutum
gcacgtcaagcacttactcacata

SEQ ID NO: 21062 - DNA, 16 bp, Gossypium hirsutum
ttgaaacgcgaagtta

SEQ ID NO: 21063 - DNA, 16 bp, Gossypium hirsutum
ttgaaacgcaaagtta

SEQ ID NO: 21064 - DNA, 19 bp, Gossypium hirsutum
ggagcccttatgccatgca

SEQ ID NO: 21065 - DNA, 32 bp, Gossypium hirsutum
ccctcttggtatgcttagtttttagattgatt

SEQ ID NO: 21066 - DNA, 16 bp, Gossypium hirsutum
cagccattggtacatg

SEQ ID NO: 21067 - DNA, 16 bp, Gossypium hirsutum
cagccattgatacatg

SEQ ID NO: 21068 - DNA, 34 bp, Gossypium hirsutum
cactactccagcttgtaaactataacaataaagt

SEQ ID NO: 21069 - DNA, 28 bp, Gossypium hirsutum
acggaacttaatttggagtttcatagct

SEQ ID NO: 21070 - DNA, 19 bp, Gossypium hirsutum
tgtcttcttgagtaatagt

SEQ ID NO: 21071 - DNA, 17 bp, Gossypium hirsutum
tcttcttgagcaatagt

SEQ ID NO: 21072 - DNA, 33 bp, Gossypium hirsutum
acacaattccattacttttttatgttcatgtca

SEQ ID NO: 21073 - DNA, 34 bp, Gossypium hirsutum
tggttgtcacctaaaaaatagcattaaatttgaa

SEQ ID NO: 21074 - DNA, 19 bp, Gossypium hirsutum
actgagcaattacttaaca

SEQ ID NO: 21075 - DNA, 18 bp, Gossypium hirsutum
ctgagcaattagttaaca

SEQ ID NO: 21076 - DNA, 32 bp, Gossypium hirsutum
gcctactaaattatttttcacaatgcctaact

SEQ ID NO: 21077 - DNA, 24 bp, Gossypium hirsutum
acgaccttgagttagctgctattg

SEQ ID NO: 21078 - DNA, 16 bp, Gossypium hirsutum
cgtttgccttaaagat

SEQ ID NO: 21079 - DNA, 16 bp, Gossypium hirsutum
cgtttgccttgaagat

SEQ ID NO: 21080 - DNA, 25 bp, Gossypium hirsutum
acgtgacatttctcaccaaacagat

SEQ ID NO: 21081 - DNA, 25 bp, Gossypium hirsutum
tcgctccttttagctgatcaaacaa

SEQ ID NO: 21082 - DNA, 14 bp, Gossypium hirsutum
atcggcagttaaac

SEQ ID NO: 21083 - DNA, 19 bp, Gossypium hirsutum
ttattatcgacagttaaac

SEQ ID NO: 21084 - DNA, 24 bp, Gossypium hirsutum
ggctttgtgagaccaagtttttca

SEQ ID NO: 21085 - DNA, 34 bp, Gossypium hirsutum
aatttatgcgttatgttatttactggttagagga

SEQ ID NO: 21086 - DNA, 16 bp, Gossypium hirsutum
ctacggcatatttttt

SEQ ID NO: 21087 - DNA, 13 bp, Gossypium hirsutum
cggcagatttttt

SEQ ID NO: 21088 - DNA, 25 bp, Gossypium hirsutum
gcaagttttccagaaagagcaaaga

SEQ ID NO: 21089 - DNA, 32 bp, Gossypium hirsutum
ccaagagaagtttcttcttgtttatcatttca

SEQ ID NO: 21090 - DNA, 20 bp, Gossypium hirsutum
cacatatgtttgaaattata

SEQ ID NO: 21091 - DNA, 20 bp, Gossypium hirsutum
cacatatgtttgatattata

SEQ ID NO: 21092 - DNA, 27 bp, Gossypium hirsutum
ttccttttctcttacagcttcttgtgt

SEQ ID NO: 21093 - DNA, 25 bp, Gossypium hirsutum
ccctttcagacaatttgtccctttt

SEQ ID NO: 21094 - DNA, 17 bp, Gossypium hirsutum
caggtacatgagcataa

SEQ ID NO: 21095 - DNA, 17 bp, Gossypium hirsutum
caggtacatgtgcataa

SEQ ID NO: 21096 - DNA, 24 bp, Gossypium hirsutum
tctgaaggtctttggatgcatctg

SEQ ID NO: 21097 - DNA, 20 bp, Gossypium hirsutum
ggtctgaccagttcgaccac

SEQ ID NO: 21098 - DNA, 16 bp, Gossypium hirsutum
ccatgctccgtgttgg

SEQ ID NO: 21099 - DNA, 15 bp, Gossypium hirsutum
catgctccatgttgg

SEQ ID NO: 21100 - DNA, 25 bp, Gossypium hirsutum
cgggcttctggtatatctagtgaac

SEQ ID NO: 21101 - DNA, 29 bp, Gossypium hirsutum
cgaggacttagcaaaatcaaataaaacct

SEQ ID NO: 21102 - DNA, 20 bp, Gossypium hirsutum
ctcgtttttgttttacaaac

SEQ ID NO: 21103 - DNA, 19 bp, Gossypium hirsutum
tcgtttttgttatacaaac

SEQ ID NO: 21104 - DNA, 25 bp, Gossypium hirsutum
gcgttcaaaagcagactaaatggtt

SEQ ID NO: 21105 - DNA, 29 bp, Gossypium hirsutum
caaccgacttcaagtagttattggaagat

SEQ ID NO: 21106 - DNA, 23 bp, Gossypium hirsutum
ccaggaaggttaattactgataa

SEQ ID NO: 21107 - DNA, 22 bp, Gossypium hirsutum
caggaaggttaattattgataa

SEQ ID NO: 21108 - DNA, 25 bp, Gossypium hirsutum
cgcttctgacgaaaaatatgcaaga

SEQ ID NO: 21109 - DNA, 36 bp, Gossypium hirsutum
ggttttgatttcttatataacaacaatgggttatca

SEQ ID NO: 21110 - DNA, 24 bp, Gossypium hirsutum
atatttttatacaatgagttattg

SEQ ID NO: 21111 - DNA, 20 bp, Gossypium hirsutum
ttttatacaatgcgttattg

SEQ ID NO: 21112 - DNA, 23 bp, Gossypium hirsutum
tgtgaaactccgccagctaaaat

SEQ ID NO: 21113 - DNA, 24 bp, Gossypium hirsutum
gcatttccaaacaaagctcggtat

SEQ ID NO: 21114 - DNA, 18 bp, Gossypium hirsutum
caaatgtggtagagaaca

SEQ ID NO: 21115 - DNA, 17 bp, Gossypium hirsutum
aaatgtggtaaagaaca

SEQ ID NO: 21116 - DNA, 25 bp, Gossypium hirsutum
cgccaaaacctgcaacaaataacat

SEQ ID NO: 21117 - DNA, 25 bp, Gossypium hirsutum
cgtctccatgttaaaactccagtgt

SEQ ID NO: 21118 - DNA, 17 bp, Gossypium hirsutum
ctaaacaggtgctctct

SEQ ID NO: 21119 - DNA, 18 bp, Gossypium hirsutum
cctaaacaggttctctct

SEQ ID NO: 21120 - DNA, 25 bp, Gossypium hirsutum
tttttctacacgccaatcaattgca

SEQ ID NO: 21121 - DNA, 22 bp, Gossypium hirsutum
gcattaccctcgcttcgttgta

SEQ ID NO: 21122 - DNA, 22 bp, Gossypium hirsutum
acttttgtagtaattaaatagc

SEQ ID NO: 21123 - DNA, 20 bp, Gossypium hirsutum
ttttgtagtaattgaatagc

SEQ ID NO: 21124 - DNA, 39 bp, Gossypium hirsutum
agtcacaaacaaatagaaaaataataagcattaagtgtt

SEQ ID NO: 21125 - DNA, 26 bp, Gossypium hirsutum
ggtttatcactttcatcctccacctt

SEQ ID NO: 21126 - DNA, 17 bp, Gossypium hirsutum
atccatcatcgatttac

SEQ ID NO: 21127 - DNA, 20 bp, Gossypium hirsutum
catatccatcatctatttac

SEQ ID NO: 21128 - DNA, 25 bp, Gossypium hirsutum
cggctaaattggaagggaaagtgaa

SEQ ID NO: 21129 - DNA, 33 bp, Gossypium hirsutum
tcatttttagggagaccaaagtgtatttttact

SEQ ID NO: 21130 - DNA, 17 bp, Gossypium hirsutum
cctaaatgaaaattttt

SEQ ID NO: 21131 - DNA, 17 bp, Gossypium hirsutum
cctaaatgaaatttttt

SEQ ID NO: 21132 - DNA, 27 bp, Gossypium hirsutum
cgagagcatcaatggtaaatgagtagt

SEQ ID NO: 21133 - DNA, 26 bp, Gossypium hirsutum
accaaggtctcaagttaatggacttt

SEQ ID NO: 21134 - DNA, 23 bp, Gossypium hirsutum
tcttatttaatcaattaacctcc

SEQ ID NO: 21135 - DNA, 22 bp, Gossypium hirsutum
cttatttaatcaattgacctcc

SEQ ID NO: 21136 - DNA, 23 bp, Gossypium hirsutum
gcccataatgaatgcgcacaaaa

SEQ ID NO: 21137 - DNA, 25 bp, Gossypium hirsutum
aacagaagctttggctaacagagat

SEQ ID NO: 21138 - DNA, 21 bp, Gossypium hirsutum
ctaagtctataaccgattatg

SEQ ID NO: 21139 - DNA, 18 bp, Gossypium hirsutum
agtctataaccaattatg

SEQ ID NO: 21140 - DNA, 31 bp, Gossypium hirsutum
tgtaacaaattgttttcatttccaacactgt

SEQ ID NO: 21141 - DNA, 25 bp, Gossypium hirsutum
cactacaaccactttctgccatact

SEQ ID NO: 21142 - DNA, 21 bp, Gossypium hirsutum
caataataacttgataatctc

SEQ ID NO: 21143 - DNA, 17 bp, Gossypium hirsutum
aataacttggtaatctc

SEQ ID NO: 21144 - DNA, 21 bp, Gossypium hirsutum
ggcgaaccaagccaaataagc

SEQ ID NO: 21145 - DNA, 24 bp, Gossypium hirsutum
cgggttcaaggctaagttcatctt

SEQ ID NO: 21146 - DNA, 18 bp, Gossypium hirsutum
ccttaccatttgcactcc

SEQ ID NO: 21147 - DNA, 17 bp, Gossypium hirsutum
ccttaccattgcactcc

SEQ ID NO: 21148 - DNA, 31 bp, Gossypium hirsutum
tgtgaaagtgcttttctctaatgaggtaaaa

SEQ ID NO: 21149 - DNA, 38 bp, Gossypium hirsutum
gcgttgatgaaaaaatattattgttaaagcatattgtg

SEQ ID NO: 21150 - DNA, 23 bp, Gossypium hirsutum
cgaatttattgttctacccttta

SEQ ID NO: 21151 - DNA, 21 bp, Gossypium hirsutum
aatttattgttctgcccttta

SEQ ID NO: 21152 - DNA, 27 bp, Gossypium hirsutum
gctcagtaattaatcttccgcattctg

SEQ ID NO: 21153 - DNA, 31 bp, Gossypium hirsutum
ccgcaatcacgattacgaattttttatcatt

SEQ ID NO: 21154 - DNA, 18 bp, Gossypium hirsutum
attatcaacttgaaattt

SEQ ID NO: 21155 - DNA, 14 bp, Gossypium hirsutum
tcaactcgaaattt

SEQ ID NO: 21156 - DNA, 25 bp, Gossypium hirsutum
gccatggccttcatatccatcttta

SEQ ID NO: 21157 - DNA, 25 bp, Gossypium hirsutum
ttctacctctgtctctgtcttttgc

SEQ ID NO: 21158 - DNA, 15 bp, Gossypium hirsutum
agagacggcggcaca

SEQ ID NO: 21159 - DNA, 15 bp, Gossypium hirsutum
agagacggaggcaca

SEQ ID NO: 21160 - DNA, 19 bp, Gossypium hirsutum
gagccagaggcagaccaaa

SEQ ID NO: 21161 - DNA, 25 bp, Gossypium hirsutum
acagcatggagtgatgcattactta

SEQ ID NO: 21162 - DNA, 18 bp, Gossypium hirsutum
cctggaagttactgactg

SEQ ID NO: 21163 - DNA, 17 bp, Gossypium hirsutum
ctggaggttactgactg

SEQ ID NO: 21164 - DNA, 23 bp, Gossypium hirsutum
ttcctatatggcgaagtgttggg

SEQ ID NO: 21165 - DNA, 25 bp, Gossypium hirsutum
ctctttgggacgattcagatatcga

SEQ ID NO: 21166 - DNA, 17 bp, Gossypium hirsutum
cgtttcaaaggtctctc

SEQ ID NO: 21167 - DNA, 17 bp, Gossypium hirsutum
cgtttcaaatgtctctc

SEQ ID NO: 21168 - DNA, 28 bp, Gossypium hirsutum
ctttaaggaatactcgtgttgtctgttg

SEQ ID NO: 21169 - DNA, 25 bp, Gossypium hirsutum
gccagtgccacccacataataataa

SEQ ID NO: 21170 - DNA, 19 bp, Gossypium hirsutum
atgcacatttttttaaaac

SEQ ID NO: 21171 - DNA, 18 bp, Gossypium hirsutum
atgcacattttttaaaac

SEQ ID NO: 21172 - DNA, 39 bp, Gossypium hirsutum
aagtaaccaaaacgaaaatttacccctaatttaataatt

SEQ ID NO: 21173 - DNA, 31 bp, Gossypium hirsutum
cgtatgtcttccaggatattttggatgataa

SEQ ID NO: 21174 - DNA, 17 bp, Gossypium hirsutum
attctctccgtcttctg

SEQ ID NO: 21175 - DNA, 16 bp, Gossypium hirsutum
ttctctccatcttctg

SEQ ID NO: 21176 - DNA, 34 bp, Gossypium hirsutum
gcctaaacatttgataaataaacaacatgcatca

SEQ ID NO: 21177 - DNA, 20 bp, Gossypium hirsutum
cagactgtggctgccatttt

SEQ ID NO: 21178 - DNA, 21 bp, Gossypium hirsutum
ttgaaagtactgaagctgcaa

SEQ ID NO: 21179 - DNA, 18 bp, Gossypium hirsutum
aaagtactgaggctgcaa

SEQ ID NO: 21180 - DNA, 25 bp, Gossypium hirsutum
tctctctctctctcgtttaagcctt

SEQ ID NO: 21181 - DNA, 29 bp, Gossypium hirsutum
tcatctccttttgcaattagtgatctcaa

SEQ ID NO: 21182 - DNA, 13 bp, Gossypium hirsutum
cctggaaaaacag

SEQ ID NO: 21183 - DNA, 13 bp, Gossypium hirsutum
cctggaaaaaaag

SEQ ID NO: 21184 - DNA, 31 bp, Gossypium hirsutum
gcgcttttcttgcaaatacttcttacttaat

SEQ ID NO: 21185 - DNA, 35 bp, Gossypium hirsutum
aacaaaattggattttgtttgtcattttacacttt

SEQ ID NO: 21186 - DNA, 20 bp, Gossypium hirsutum
ctttcttacatccggtcaac

SEQ ID NO: 21187 - DNA, 19 bp, Gossypium hirsutum
tttcttacatccagtcaac

SEQ ID NO: 21188 - DNA, 28 bp, Gossypium hirsutum
agtgctgaaccataaacaaagaaaatgg

SEQ ID NO: 21189 - DNA, 25 bp, Gossypium hirsutum
ttggcatgaaggttaccgatttact

SEQ ID NO: 21190 - DNA, 19 bp, Gossypium hirsutum
ataatcacatgattaatgc

SEQ ID NO: 21191 - DNA, 19 bp, Gossypium hirsutum
ataatcacatcattaatgc

SEQ ID NO: 21192 - DNA, 32 bp, Gossypium hirsutum
cgatatggttgtttccttttttgtatttcact

SEQ ID NO: 21193 - DNA, 25 bp, Gossypium hirsutum
acttggacaaaacgaattcctggaa

SEQ ID NO: 21194 - DNA, 18 bp, Gossypium hirsutum
aattgactggatcgaatc

SEQ ID NO: 21195 - DNA, 16 bp, Gossypium hirsutum
ttgactgggtcgaatc

SEQ ID NO: 21196 - DNA, 34 bp, Gossypium hirsutum
tcatcacagaaacaagttttatataagaggaaca

SEQ ID NO: 21197 - DNA, 25 bp, Gossypium hirsutum
gaaggtcatagaagactgcgaatca

SEQ ID NO: 21198 - DNA, 14 bp, Gossypium hirsutum
ctccgaggttctgc

SEQ ID NO: 21199 - DNA, 14 bp, Gossypium hirsutum
ctccgagattctgc

SEQ ID NO: 21200 - DNA, 21 bp, Gossypium hirsutum
gttgggcggttaggtttgttc

SEQ ID NO: 21201 - DNA, 30 bp, Gossypium hirsutum
cgcaactagaatacatgttgatcaaatgat

SEQ ID NO: 21202 - DNA, 21 bp, Gossypium hirsutum
ctttttcaatccagttagttt

SEQ ID NO: 21203 - DNA, 20 bp, Gossypium hirsutum
tttttcaatccggttagttt

SEQ ID NO: 21204 - DNA, 25 bp, Gossypium hirsutum
agtgtctcaaagaaggcaaattcct

SEQ ID NO: 21205 - DNA, 30 bp, Gossypium hirsutum
gtgggagttggtaaattattaggtaatggt

SEQ ID NO: 21206 - DNA, 21 bp, Gossypium hirsutum
atgaaaataaatgcaaagtta

SEQ ID NO: 21207 - DNA, 23 bp, Gossypium hirsutum
tgatgaaaataaatacaaagtta

SEQ ID NO: 21208 - DNA, 28 bp, Gossypium hirsutum
aaaatggatgagaaaatcagcagcaatt

SEQ ID NO: 21209 - DNA, 21 bp, Gossypium hirsutum
gccaaccaggcttcaatctga

SEQ ID NO: 21210 - DNA, 14 bp, Gossypium hirsutum
tcgtgggccaaatg

SEQ ID NO: 21211 - DNA, 13 bp, Gossypium hirsutum
cgtgggctaaatg

SEQ ID NO: 21212 - DNA, 15 bp, Gossypium hirsutum
gtcacgggccgcagt

SEQ ID NO: 21213 - DNA, 24 bp, Gossypium hirsutum
ccactcctcgctcactttagaatt

SEQ ID NO: 21214 - DNA, 18 bp, Gossypium hirsutum
ctagtcgcttctgtaaac

SEQ ID NO: 21215 - DNA, 18 bp, Gossypium hirsutum
ctagtcgcttctataaac

SEQ ID NO: 21216 - DNA, 27 bp, Gossypium hirsutum
gtagaagactacagcgatggtaaactt

SEQ ID NO: 21217 - DNA, 29 bp, Gossypium hirsutum
gtgaacctctagtagatgaggtatttcct

SEQ ID NO: 21218 - DNA, 18 bp, Gossypium hirsutum
ctattgattcgtaaaaat

SEQ ID NO: 21219 - DNA, 18 bp, Gossypium hirsutum
ctattgattcctaaaaat

SEQ ID NO: 21220 - DNA, 23 bp, Gossypium hirsutum
gccctaaagaaagggaacaatgc

SEQ ID NO: 21221 - DNA, 31 bp, Gossypium hirsutum
tccatgtcttgaatccaaaatcatatcttca

SEQ ID NO: 21222 - DNA, 22 bp, Gossypium hirsutum
aactctagatggatctcaataa

SEQ ID NO: 21223 - DNA, 20 bp, Gossypium hirsutum
ctctagatggatcccaataa

SEQ ID NO: 21224 - DNA, 25 bp, Gossypium hirsutum
ccgatttctagcacttgatgtcact

SEQ ID NO: 21225 - DNA, 39 bp, Gossypium hirsutum
tcaagtttttctcaagttaaactcaaatagtttgtaaat

SEQ ID NO: 21226 - DNA, 19 bp, Gossypium hirsutum
ttaggtgtacgtgatacaa

SEQ ID NO: 21227 - DNA, 20 bp, Gossypium hirsutum
attaggtgtacatgatacaa

SEQ ID NO: 21228 - DNA, 29 bp, Gossypium hirsutum
gtgacagttcccttttttctcttttcttt

SEQ ID NO: 21229 - DNA, 23 bp, Gossypium hirsutum
gcaaagtcagtaggacacctctt

SEQ ID NO: 21230 - DNA, 19 bp, Gossypium hirsutum
ttaccatggttattatctc

SEQ ID NO: 21231 - DNA, 16 bp, Gossypium hirsutum
ccatggttcttatctc

SEQ ID NO: 21232 - DNA, 34 bp, Gossypium hirsutum
cgaaaatacagaaaaaatatagaaagcccaaaga

SEQ ID NO: 21233 - DNA, 33 bp, Gossypium hirsutum
gccataaaattggctaattacttcgatataagg

SEQ ID NO: 21234 - DNA, 21 bp, Gossypium hirsutum
taataagttagggtaactaag

SEQ ID NO: 21235 - DNA, 21 bp, Gossypium hirsutum
taataagttagggtgactaag

SEQ ID NO: 21236 - DNA, 29 bp, Gossypium hirsutum
gtcatggtttaagttgatttggtaatgct

SEQ ID NO: 21237 - DNA, 39 bp, Gossypium hirsutum
gactgtgttaaaatatattatgagaactatgataccctt

SEQ ID NO: 21238 - DNA, 25 bp, Gossypium hirsutum
ttatcattatgataagtgatgtgac

SEQ ID NO: 21239 - DNA, 23 bp, Gossypium hirsutum
atcattatgataagtgttgtgac

SEQ ID NO: 21240 - DNA, 25 bp, Gossypium hirsutum
cgaacagtcatgagaacactcttga

SEQ ID NO: 21241 - DNA, 31 bp, Gossypium hirsutum
tgaacgttgaagtcaaatttaagcatttgta

SEQ ID NO: 21242 - DNA, 23 bp, Gossypium hirsutum
ctaaatttaagtaccaaataata

SEQ ID NO: 21243 - DNA, 24 bp, Gossypium hirsutum
tctaaatttaagtaccaaatagta

SEQ ID NO: 21244 - DNA, 26 bp, Gossypium hirsutum
actattatcaaaccaatcgcgggatt

SEQ ID NO: 21245 - DNA, 39 bp, Gossypium hirsutum
ccaagtttaatatagaatcattagtctcttttcattcga

SEQ ID NO: 21246 - DNA, 15 bp, Gossypium hirsutum
acatgccattgaaac

SEQ ID NO: 21247 - DNA, 15 bp, Gossypium hirsutum
acatgcccttgaaac

SEQ ID NO: 21248 - DNA, 26 bp, Gossypium hirsutum
caaagaaaaggcaaagtgagaaagct

SEQ ID NO: 21249 - DNA, 36 bp, Gossypium hirsutum
ccatcaatgtacatcattttgattggtataataaca

SEQ ID NO: 21250 - DNA, 21 bp, Gossypium hirsutum
ccaaaatgacaatatataaaa

SEQ ID NO: 21251 - DNA, 20 bp, Gossypium hirsutum
caaaatgacaatacataaaa

SEQ ID NO: 21252 - DNA, 28 bp, Gossypium hirsutum
tgtgtaaatgttgaggctgaatttgttg

SEQ ID NO: 21253 - DNA, 28 bp, Gossypium hirsutum
agaagaggcaaaaatgtaaagtcatcct

SEQ ID NO: 21254 - DNA, 18 bp, Gossypium hirsutum
ctagacagttatttagcc

SEQ ID NO: 21255 - DNA, 17 bp, Gossypium hirsutum
tagacagttgtttagcc

SEQ ID NO: 21256 - DNA, 22 bp, Gossypium hirsutum
cctctgtctcctctgctcagaa

SEQ ID NO: 21257 - DNA, 24 bp, Gossypium hirsutum
accctaatcaacgctttcgcttat

SEQ ID NO: 21258 - DNA, 22 bp, Gossypium hirsutum
acatattatgaccattactttt

SEQ ID NO: 21259 - DNA, 19 bp, Gossypium hirsutum
tattatgaccgttactttt

SEQ ID NO: 21260 - DNA, 25 bp, Gossypium hirsutum
ccaatgccttttcacgattcttcaa

SEQ ID NO: 21261 - DNA, 43 bp, Gossypium hirsutum
gactaataaatttggacttttattgtttttgggtttttatatt

SEQ ID NO: 21262 - DNA, 19 bp, Gossypium hirsutum
cctgtgcattcttagttta

SEQ ID NO: 21263 - DNA, 17 bp, Gossypium hirsutum
tgtgcattcttggttta

SEQ ID NO: 21264 - DNA, 45 bp, Gossypium hirsutum
ctagcctaaaaaataaaagggtttgttttatctaaattaattaac

SEQ ID NO: 21265 - DNA, 26 bp, Gossypium hirsutum
tgaagctgtaccgctttaatacaaca

SEQ ID NO: 21266 - DNA, 17 bp, Gossypium hirsutum
cggaatacctgaacaaa

SEQ ID NO: 21267 - DNA, 17 bp, Gossypium hirsutum
cggaatacctaaacaaa

SEQ ID NO: 21268 - DNA, 25 bp, Gossypium hirsutum
gagcacatctcatgacgtacaagta

SEQ ID NO: 21269 - DNA, 19 bp, Gossypium hirsutum
ccgacaaggaagcgagtct

SEQ ID NO: 21270 - DNA, 19 bp, Gossypium hirsutum
atgttagtactgaaaggag

SEQ ID NO: 21271 - DNA, 18 bp, Gossypium hirsutum
tgttagtactggaaggag

SEQ ID NO: 21272 - DNA, 24 bp, Gossypium hirsutum
cgacagcctatcgtattccttgag

SEQ ID NO: 21273 - DNA, 28 bp, Gossypium hirsutum
tgatcgagcaattttcatgagaaactct

SEQ ID NO: 21274 - DNA, 21 bp, Gossypium hirsutum
tctggtattctaaatccttca

SEQ ID NO: 21275 - DNA, 20 bp, Gossypium hirsutum
ctggtattctaaatgcttca

SEQ ID NO: 21276 - DNA, 27 bp, Gossypium hirsutum
tgtgtctaatggatgttgttacagctt

SEQ ID NO: 21277 - DNA, 33 bp, Gossypium hirsutum
ccaattcactttacttttgattgtttgtttgaa

SEQ ID NO: 21278 - DNA, 21 bp, Gossypium hirsutum
ctaaattatggataaattttt

SEQ ID NO: 21279 - DNA, 21 bp, Gossypium hirsutum
ctaaattatggataagttttt

SEQ ID NO: 21280 - DNA, 24 bp, Gossypium hirsutum
tcacttatagctcgctgacaaagc

SEQ ID NO: 21281 - DNA, 35 bp, Gossypium hirsutum
acaagtgttaaatgtgtcttaatctattacaaggt

SEQ ID NO: 21282 - DNA, 19 bp, Gossypium hirsutum
cattaattcggccagacat

SEQ ID NO: 21283 - DNA, 19 bp, Gossypium hirsutum
cattaattcgcccagacat

SEQ ID NO: 21284 - DNA, 25 bp, Gossypium hirsutum
gcacctgtaccaaacaaatcaacaa

SEQ ID NO: 21285 - DNA, 25 bp, Gossypium hirsutum
cccgtaaaatctgaacatgttgctt

SEQ ID NO: 21286 - DNA, 20 bp, Gossypium hirsutum
aaacctatgtattaaaggtg

SEQ ID NO: 21287 - DNA, 20 bp, Gossypium hirsutum
aaacctatgtattgaaggtg

SEQ ID NO: 21288 - DNA, 27 bp, Gossypium hirsutum
aggaatgccacaatgattagaaacact

SEQ ID NO: 21289 - DNA, 28 bp, Gossypium hirsutum
tcatccgtttctactgttaaaagttggt

SEQ ID NO: 21290 - DNA, 17 bp, Gossypium hirsutum
catgtcaacgtacaagg

SEQ ID NO: 21291 - DNA, 17 bp, Gossypium hirsutum
catgtcaacatacaagg

SEQ ID NO: 21292 - DNA, 24 bp, Gossypium hirsutum
cgtggctgatggaataactagaca

SEQ ID NO: 21293 - DNA, 28 bp, Gossypium hirsutum
tgtgaaagttagagacttgaggaaaagg

SEQ ID NO: 21294 - DNA, 21 bp, Gossypium hirsutum
aagtgaactcttttaacttat

SEQ ID NO: 21295 - DNA, 20 bp, Gossypium hirsutum
aagtgaactctttaacttat

SEQ ID NO: 21296 - DNA, 32 bp, Gossypium hirsutum
cggagggataagggtgttaataaagaataaat

SEQ ID NO: 21297 - DNA, 31 bp, Gossypium hirsutum
aggagtgagtaaaactcgattcaactaaaaa

SEQ ID NO: 21298 - DNA, 18 bp, Gossypium hirsutum
attctttttcaaattttg

SEQ ID NO: 21299 - DNA, 15 bp, Gossypium hirsutum
ctttttcgaattttg

SEQ ID NO: 21300 - DNA, 36 bp, Gossypium hirsutum
attcgagttattcgaatttgaaaactaaactcaatt

SEQ ID NO: 21301 - DNA, 29 bp, Gossypium hirsutum
cgttgtgttttcattctattttcgagttc

SEQ ID NO: 21302 - DNA, 21 bp, Gossypium hirsutum
atatagttgaaaaaaaacatg

SEQ ID NO: 21303 - DNA, 20 bp, Gossypium hirsutum
atatagttgaaaaaaacatg

SEQ ID NO: 21304 - DNA, 25 bp, Gossypium hirsutum
tccatcattggttttggacgaagat

SEQ ID NO: 21305 - DNA, 29 bp, Gossypium hirsutum
aacagggactgaatcataaatttgagaca

SEQ ID NO: 21306 - DNA, 21 bp, Gossypium hirsutum
atttctaattttggcttttac

SEQ ID NO: 21307 - DNA, 21 bp, Gossypium hirsutum
atttctaattttgacttttac

SEQ ID NO: 21308 - DNA, 33 bp, Gossypium hirsutum
cgctaattttaagcttgttccacatattactaa

SEQ ID NO: 21309 - DNA, 25 bp, Gossypium hirsutum
caaggttgcaggaaaggattagaga

SEQ ID NO: 21310 - DNA, 15 bp, Gossypium hirsutum
ccacgctttggccaa

SEQ ID NO: 21311 - DNA, 15 bp, Gossypium hirsutum
ccacgctatggccaa

SEQ ID NO: 21312 - DNA, 25 bp, Gossypium hirsutum
tgcattcccgatagcaatacttcat

SEQ ID NO: 21313 - DNA, 28 bp, Gossypium hirsutum
cctcagtatagagcaatgatttccacaa

SEQ ID NO: 21314 - DNA, 18 bp, Gossypium hirsutum
aactttgctggtgtacaa

SEQ ID NO: 21315 - DNA, 20 bp, Gossypium hirsutum
tgaactttgctagtgtacaa

SEQ ID NO: 21316 - DNA, 32 bp, Gossypium hirsutum
ccctttctatttgcttcatgttctatcattag

SEQ ID NO: 21317 - DNA, 31 bp, Gossypium hirsutum
gttaaaagaaaaagagaagagcaaagctgaa

SEQ ID NO: 21318 - DNA, 16 bp, Gossypium hirsutum
tatcctgcgttccagc

SEQ ID NO: 21319 - DNA, 13 bp, Gossypium hirsutum
cctgcgctccagc

SEQ ID NO: 21320 - DNA, 32 bp, Gossypium hirsutum
tctcttagacgtagactgaaatgatttactca

SEQ ID NO: 21321 - DNA, 27 bp, Gossypium hirsutum
tcccaatattgtagacaggcaatttcc

SEQ ID NO: 21322 - DNA, 16 bp, Gossypium hirsutum
ttggctctcaatgaaa

SEQ ID NO: 21323 - DNA, 16 bp, Gossypium hirsutum
ttggctctcactgaaa

SEQ ID NO: 21324 - DNA, 31 bp, Gossypium hirsutum
ccatgtcactatatatgcaaattagggttct

SEQ ID NO: 21325 - DNA, 22 bp, Gossypium hirsutum
tcgtcgaatttggtggtctcaa

SEQ ID NO: 21326 - DNA, 14 bp, Gossypium hirsutum
caccacagaaaatt

SEQ ID NO: 21327 - DNA, 13 bp, Gossypium hirsutum
accactgaaaatt

SEQ ID NO: 21328 - DNA, 23 bp, Gossypium hirsutum
ggccaagcctcagataggatttt

SEQ ID NO: 21329 - DNA, 27 bp, Gossypium hirsutum
cgagaagcaaggaaatgaacatgaaaa

SEQ ID NO: 21330 - DNA, 16 bp, Gossypium hirsutum
tcaaccatgggcaaaa

SEQ ID NO: 21331 - DNA, 16 bp, Gossypium hirsutum
tcaaccatgagcaaaa

SEQ ID NO: 21332 - DNA, 20 bp, Gossypium hirsutum
gtgggtggctgggaaagaat

SEQ ID NO: 21333 - DNA, 22 bp, Gossypium hirsutum
tgaagaacctgacccacaagtg

SEQ ID NO: 21334 - DNA, 18 bp, Gossypium hirsutum
aagcaccaagtgtgacat

SEQ ID NO: 21335 - DNA, 18 bp, Gossypium hirsutum
aagcaccaagtatgacat

SEQ ID NO: 21336 - DNA, 25 bp, Gossypium hirsutum
actggtagcagaaatctctctccaa

SEQ ID NO: 21337 - DNA, 29 bp, Gossypium hirsutum
cacatgttaactgtatcacaaaagctgtt

SEQ ID NO: 21338 - DNA, 18 bp, Gossypium hirsutum
caccttctctggatggta

SEQ ID NO: 21339 - DNA, 18 bp, Gossypium hirsutum
caccttctctagatggta

SEQ ID NO: 21340 - DNA, 34 bp, Gossypium hirsutum
gctcctgaaacataataaatagaaacattagcct

SEQ ID NO: 21341 - DNA, 30 bp, Gossypium hirsutum
acgagatggaaagtcagatatgttacaaag

SEQ ID NO: 21342 - DNA, 24 bp, Gossypium hirsutum
caaaatatgagaatacaaggtcta

SEQ ID NO: 21343 - DNA, 21 bp, Gossypium hirsutum
aatatgagaatacgaggtcta

SEQ ID NO: 21344 - DNA, 24 bp, Gossypium hirsutum
ggtgtgtttgattcacgttacctt

SEQ ID NO: 21345 - DNA, 25 bp, Gossypium hirsutum
cgctttgatgggtcctgatttctaa

SEQ ID NO: 21346 - DNA, 19 bp, Gossypium hirsutum
agtaagctaactcaactaa

SEQ ID NO: 21347 - DNA, 21 bp, Gossypium hirsutum
ccagtaagctaactctactaa

SEQ ID NO: 21348 - DNA, 24 bp, Gossypium hirsutum
ctcgcaatgcatcatcatcatcat

SEQ ID NO: 21349 - DNA, 23 bp, Gossypium hirsutum
attatgccatgtggtggctagag

SEQ ID NO: 21350 - DNA, 20 bp, Gossypium hirsutum
ctgatacaactgataaatga

SEQ ID NO: 21351 - DNA, 20 bp, Gossypium hirsutum
ctgatacaactgatatatga

SEQ ID NO: 21352 - DNA, 23 bp, Gossypium hirsutum
tgtcgggtcgttttagtgaatgt

SEQ ID NO: 21353 - DNA, 25 bp, Gossypium hirsutum
agcttgaacttgttcatgagtctgt

SEQ ID NO: 21354 - DNA, 18 bp, Gossypium hirsutum
aaccaataaggcaatagt

SEQ ID NO: 21355 - DNA, 17 bp, Gossypium hirsutum
accaataagccaatagt

SEQ ID NO: 21356 - DNA, 34 bp, Gossypium hirsutum
tctttcaaatggcatcaaaactagtcaatatact

SEQ ID NO: 21357 - DNA, 31 bp, Gossypium hirsutum
agaaagaatcgaaggttagagttagacaaac

SEQ ID NO: 21358 - DNA, 22 bp, Gossypium hirsutum
tgtaaagtacaaagaaaacaga

SEQ ID NO: 21359 - DNA, 20 bp, Gossypium hirsutum
taaagtacaaaggaaacaga

SEQ ID NO: 21360 - DNA, 22 bp, Gossypium hirsutum
agctttccccaaatgactggtt

SEQ ID NO: 21361 - DNA, 31 bp, Gossypium hirsutum
cgcaaaccctagttttttattaggtttagtt

SEQ ID NO: 21362 - DNA, 20 bp, Gossypium hirsutum
caatgaaatttcctaaatca

SEQ ID NO: 21363 - DNA, 21 bp, Gossypium hirsutum
atcaatgaaatttctaaatca

SEQ ID NO: 21364 - DNA, 31 bp, Gossypium hirsutum
tggcataatctaacttctgtacctatacaca

SEQ ID NO: 21365 - DNA, 23 bp, Gossypium hirsutum
ttcttcagtaatggtgccagcat

SEQ ID NO: 21366 - DNA, 23 bp, Gossypium hirsutum
cttaattccatctttaacttcat

SEQ ID NO: 21367 - DNA, 18 bp, Gossypium hirsutum
ttccatctttcacttcat

SEQ ID NO: 21368 - DNA, 24 bp, Gossypium hirsutum
ggctctgtctgggaaactagaatg

SEQ ID NO: 21369 - DNA, 22 bp, Gossypium hirsutum
ccaatttcgtccggctatcaga

SEQ ID NO: 21370 - DNA, 17 bp, Gossypium hirsutum
tctctgttaccaatgac

SEQ ID NO: 21371 - DNA, 14 bp, Gossypium hirsutum
ctgttgccaatgac

SEQ ID NO: 21372 - DNA, 19 bp, Gossypium hirsutum
tccccaggtcggtcatagg

SEQ ID NO: 21373 - DNA, 25 bp, Gossypium hirsutum
gctttatgggcctatagaactgctt

SEQ ID NO: 21374 - DNA, 18 bp, Gossypium hirsutum
tgttcttatgggagtttt

SEQ ID NO: 21375 - DNA, 19 bp, Gossypium hirsutum
atgttcttatgagagtttt

SEQ ID NO: 21376 - DNA, 28 bp, Gossypium hirsutum
gaatgctttgtgctctaattcaaacagt

SEQ ID NO: 21377 - DNA, 28 bp, Gossypium hirsutum
acttcccaataaccaaaatccagtatgt

SEQ ID NO: 21378 - DNA, 21 bp, Gossypium hirsutum
taactagattctggttcactg

SEQ ID NO: 21379 - DNA, 20 bp, Gossypium hirsutum
aactagattctgattcactg

SEQ ID NO: 21380 - DNA, 27 bp, Gossypium hirsutum
cacagtatcatatttgtgccttctgtt

SEQ ID NO: 21381 - DNA, 28 bp, Gossypium hirsutum
gtacgaattggttcaacatgattatgca

SEQ ID NO: 21382 - DNA, 22 bp, Gossypium hirsutum
ttaaaaaatacataaaaaaaac

SEQ ID NO: 21383 - DNA, 21 bp, Gossypium hirsutum
ttaaaaaatacataaaaaaac

SEQ ID NO: 21384 - DNA, 42 bp, Gossypium hirsutum
tttatcttgaaagagcttaaaaatattcaaatatgtcttacc

SEQ ID NO: 21385 - DNA, 46 bp, Gossypium hirsutum
cgtaaaatcttactatatcataatttgtaaatatcttcatccacat

SEQ ID NO: 21386 - DNA, 18 bp, Gossypium hirsutum
aaagatcagaagaaaact

SEQ ID NO: 21387 - DNA, 16 bp, Gossypium hirsutum
agatcagaacaaaact

SEQ ID NO: 21388 - DNA, 25 bp, Gossypium hirsutum
gcaatggaggtagagatgacatcaa

SEQ ID NO: 21389 - DNA, 17 bp, Gossypium hirsutum
ccgcagccgtcaatgtg

SEQ ID NO: 21390 - DNA, 18 bp, Gossypium hirsutum
catgatgtttatttctcc

SEQ ID NO: 21391 - DNA, 17 bp, Gossypium hirsutum
atgatgtttctttctcc

SEQ ID NO: 21392 - DNA, 31 bp, Gossypium hirsutum
aaatgaaagaatgaggaggagaagaaaaaga

SEQ ID NO: 21393 - DNA, 25 bp, Gossypium hirsutum
ctcttctttgtcagggaactcagat

SEQ ID NO: 21394 - DNA, 14 bp, Gossypium hirsutum
acccacgccatttg

SEQ ID NO: 21395 - DNA, 16 bp, Gossypium hirsutum
atacccacaccatttg

SEQ ID NO: 21396 - DNA, 28 bp, Gossypium hirsutum
tcagaattatcaattccagaaggccttt

SEQ ID NO: 21397 - DNA, 29 bp, Gossypium hirsutum
caaggtaatcgccatatggtactgaatta

SEQ ID NO: 21398 - DNA, 17 bp, Gossypium hirsutum
agcatagcagtgaacat

SEQ ID NO: 21399 - DNA, 18 bp, Gossypium hirsutum
aagcatagcaatgaacat

SEQ ID NO: 21400 - DNA, 26 bp, Gossypium hirsutum
cagccactatgtccatttaagcatct

SEQ ID NO: 21401 - DNA, 24 bp, Gossypium hirsutum
tgatgctcgttaagttggttggat

SEQ ID NO: 21402 - DNA, 25 bp, Gossypium hirsutum
tttaatctaatgtatatggattatt

SEQ ID NO: 21403 - DNA, 20 bp, Gossypium hirsutum
tctaatgtatagggattatt

SEQ ID NO: 21404 - DNA, 36 bp, Gossypium hirsutum
tttagcaatacaaatagatgaaatttttagcggaaa

SEQ ID NO: 21405 - DNA, 31 bp, Gossypium hirsutum
agataagaggagagaaaatgatagagatgca

SEQ ID NO: 21406 - DNA, 23 bp, Gossypium hirsutum
aaaaataaaacatttaaaaaaat

SEQ ID NO: 21407 - DNA, 22 bp, Gossypium hirsutum
aaaaataaaacatttaaaaaat

SEQ ID NO: 21408 - DNA, 36 bp, Gossypium hirsutum
gtaattttcttttcattcattacttggtagagttga

SEQ ID NO: 21409 - DNA, 23 bp, Gossypium hirsutum
ggcttgtggctgtgtaagaaaag

SEQ ID NO: 21410 - DNA, 16 bp, Gossypium hirsutum
cacatgggcatgtcat

SEQ ID NO: 21411 - DNA, 15 bp, Gossypium hirsutum
acatgggcgtgtcat

SEQ ID NO: 21412 - DNA, 25 bp, Gossypium hirsutum
ctagctattgacttaagcccacagt

SEQ ID NO: 21413 - DNA, 35 bp, Gossypium hirsutum
agatactttaaaggttatcgaattgaagaagacat

SEQ ID NO: 21414 - DNA, 22 bp, Gossypium hirsutum
caattgagataaaaaaaaatat

SEQ ID NO: 21415 - DNA, 20 bp, Gossypium hirsutum
aattgagataaaaaaaatat

SEQ ID NO: 21416 - DNA, 29 bp, Gossypium hirsutum
acacatgcgaagttattaatttcgtttgt

SEQ ID NO: 21417 - DNA, 30 bp, Gossypium hirsutum
gctttcaacagcagttttctgtagttttta

SEQ ID NO: 21418 - DNA, 24 bp, Gossypium hirsutum
ttatgaaagtcgaaagacctgtga

SEQ ID NO: 21419 - DNA, 19 bp, Gossypium hirsutum
aaagtcgaaaggcctgtga

SEQ ID NO: 21420 - DNA, 27 bp, Gossypium hirsutum
agaagtgatgcatgaggattttcagat

SEQ ID NO: 21421 - DNA, 23 bp, Gossypium hirsutum
aagcaactgccctgacatatctc

SEQ ID NO: 21422 - DNA, 21 bp, Gossypium hirsutum
caacagaattatgacctgaac

SEQ ID NO: 21423 - DNA, 19 bp, Gossypium hirsutum
acagaattatggcctgaac

SEQ ID NO: 21424 - DNA, 23 bp, Gossypium hirsutum
gggatctggacaatgctctagtc

SEQ ID NO: 21425 - DNA, 32 bp, Gossypium hirsutum
atttgtttgtttgtttaatttgttggttgaca

SEQ ID NO: 21426 - DNA, 19 bp, Gossypium hirsutum
ctaccaaatgaattttttt

SEQ ID NO: 21427 - DNA, 16 bp, Gossypium hirsutum
ccaaatgaaatttttt

SEQ ID NO: 21428 - DNA, 33 bp, Gossypium hirsutum
tgtttttgttaaattcaagttcattacaaccca

SEQ ID NO: 21429 - DNA, 21 bp, Gossypium hirsutum
ccaagtacccgggttctaagg

SEQ ID NO: 21430 - DNA, 16 bp, Gossypium hirsutum
atgactgcacggttgt

SEQ ID NO: 21431 - DNA, 13 bp, Gossypium hirsutum
actgcgcggttgt

SEQ ID NO: 21432 - DNA, 22 bp, Gossypium hirsutum
gctggctgatatctgacaacgt

SEQ ID NO: 21433 - DNA, 32 bp, Gossypium hirsutum
tgagaaacaaatcacctctcattaataaaggt

SEQ ID NO: 21434 - DNA, 21 bp, Gossypium hirsutum
aagaaatactagtaaaaaaat

SEQ ID NO: 21435 - DNA, 20 bp, Gossypium hirsutum
aagaaatactagtaaaaaat

SEQ ID NO: 21436 - DNA, 39 bp, Gossypium hirsutum
gttcagttcacactgtatataaaataaattcaaatacgt

SEQ ID NO: 21437 - DNA, 20 bp, Gossypium hirsutum
ggcaaaccgcatgacctaca

SEQ ID NO: 21438 - DNA, 23 bp, Gossypium hirsutum
attcctactagtatcctacaaac

SEQ ID NO: 21439 - DNA, 23 bp, Gossypium hirsutum
attcctactagtatcttacaaac

SEQ ID NO: 21440 - DNA, 28 bp, Gossypium hirsutum
gcttaaagtaggtgtgattgaagggtta

SEQ ID NO: 21441 - DNA, 35 bp, Gossypium hirsutum
ggcaaattagtctttgtacattaaattaaagagca

SEQ ID NO: 21442 - DNA, 18 bp, Gossypium hirsutum
ccatgccagtttttataa

SEQ ID NO: 21443 - DNA, 17 bp, Gossypium hirsutum
catgccagttattataa

SEQ ID NO: 21444 - DNA, 25 bp, Gossypium hirsutum
gaggtacacgtggttgtcaagttaa

SEQ ID NO: 21445 - DNA, 32 bp, Gossypium hirsutum
tcttaagatctttatccttcatgcttcagttg

SEQ ID NO: 21446 - DNA, 21 bp, Gossypium hirsutum
ctaagaagtatactaagaatg

SEQ ID NO: 21447 - DNA, 19 bp, Gossypium hirsutum
aagaagtatacaaagaatg

SEQ ID NO: 21448 - DNA, 24 bp, Gossypium hirsutum
gccacacaacacaataatcttgct

SEQ ID NO: 21449 - DNA, 31 bp, Gossypium hirsutum
cagctaataattttttgatgcagtgatctgt

SEQ ID NO: 21450 - DNA, 18 bp, Gossypium hirsutum
ccaatctctcttattttt

SEQ ID NO: 21451 - DNA, 17 bp, Gossypium hirsutum
ccaatctctcttttttt

SEQ ID NO: 21452 - DNA, 46 bp, Gossypium hirsutum
ccttatatttaaaagttctaatactaattttatcaacatgtgtgaa

SEQ ID NO: 21453 - DNA, 26 bp, Gossypium hirsutum
gctcatatgatccggtaagtcatctt

SEQ ID NO: 21454 - DNA, 17 bp, Gossypium hirsutum
ctcctcgttacataact

SEQ ID NO: 21455 - DNA, 16 bp, Gossypium hirsutum
tcctcgttagataact

SEQ ID NO: 21456 - DNA, 34 bp, Gossypium hirsutum
actaacctaaatgaatggatgatgagaaaaatga

SEQ ID NO: 21457 - DNA, 22 bp, Gossypium hirsutum
ggtaggtgaacccaatgggatt

SEQ ID NO: 21458 - DNA, 18 bp, Gossypium hirsutum
caagtcaattcattatgc

SEQ ID NO: 21459 - DNA, 18 bp, Gossypium hirsutum
caagtcaattcgttatgc

SEQ ID NO: 21460 - DNA, 38 bp, Gossypium hirsutum
gcaatattcaatcaattcatatgtatacacatgtactt

SEQ ID NO: 21461 - DNA, 39 bp, Gossypium hirsutum
gatttttttcttttatgcttttttagctttccttttttt

SEQ ID NO: 21462 - DNA, 23 bp, Gossypium hirsutum
ttaattttttttcgagtgatgcg

SEQ ID NO: 21463 - DNA, 19 bp, Gossypium hirsutum
atttttttcgagtgatgcg

SEQ ID NO: 21464 - DNA, 35 bp, Gossypium hirsutum
tgttttcctcccttcttcatttcttttaatatagt

SEQ ID NO: 21465 - DNA, 29 bp, Gossypium hirsutum
atcaatgaaagcatgagtttttccatgtt

SEQ ID NO: 21466 - DNA, 23 bp, Gossypium hirsutum
ttatgttgcttttataaaatata

SEQ ID NO: 21467 - DNA, 23 bp, Gossypium hirsutum
ttatgttgcttttataagatata

SEQ ID NO: 21468 - DNA, 29 bp, Gossypium hirsutum
tgatatcaacaactattgagtgcattggt

SEQ ID NO: 21469 - DNA, 28 bp, Gossypium hirsutum
tgaacaatgtggaaagttcttgaaacaa

SEQ ID NO: 21470 - DNA, 16 bp, Gossypium hirsutum
cactgcttgtgtctcg

SEQ ID NO: 21471 - DNA, 16 bp, Gossypium hirsutum
cactgcttctgtctcg

SEQ ID NO: 21472 - DNA, 21 bp, Gossypium hirsutum
ggataaggttcctgcatggct

SEQ ID NO: 21473 - DNA, 33 bp, Gossypium hirsutum
cgattacataagatgtttatagatcaggttcgg

SEQ ID NO: 21474 - DNA, 23 bp, Gossypium hirsutum
aaatgtgttagtatcatgattaa

SEQ ID NO: 21475 - DNA, 25 bp, Gossypium hirsutum
ataaaatgtgttagtatatgattaa

SEQ ID NO: 21476 - DNA, 25 bp, Gossypium hirsutum
ctcgtacttcaaatcgagtcgagtt

SEQ ID NO: 21477 - DNA, 24 bp, Gossypium hirsutum
gtttcctcgggagcgattagaata

SEQ ID NO: 21478 - DNA, 20 bp, Gossypium hirsutum
actcatatcatctgctaaat

SEQ ID NO: 21479 - DNA, 18 bp, Gossypium hirsutum
tcatatcatccgctaaat

SEQ ID NO: 21480 - DNA, 34 bp, Gossypium hirsutum
cacaacacccacaaatacaaatttagaaattatg

SEQ ID NO: 21481 - DNA, 25 bp, Gossypium hirsutum
catgcatgagcaacaaaccatctta

SEQ ID NO: 21482 - DNA, 21 bp, Gossypium hirsutum
atcattactatcgtagcaacg

SEQ ID NO: 21483 - DNA, 17 bp, Gossypium hirsutum
ttactgtcgtagcaacg

SEQ ID NO: 21484 - DNA, 42 bp, Gossypium hirsutum
aattctttacaaatttttaatagtatgattccactttttcct

SEQ ID NO: 21485 - DNA, 28 bp, Gossypium hirsutum
accgaatcaagtttcctctactcaaaac

SEQ ID NO: 21486 - DNA, 22 bp, Gossypium hirsutum
aataaagtgaccactaagtaaa

SEQ ID NO: 21487 - DNA, 18 bp, Gossypium hirsutum
aagtgaccactcagtaaa

SEQ ID NO: 21488 - DNA, 38 bp, Gossypium hirsutum
gtatcaaggtctgtttcaaatttaagaaaatgtattct

SEQ ID NO: 21489 - DNA, 30 bp, Gossypium hirsutum
cccaaacaaccattctatttttcttatgct

SEQ ID NO: 21490 - DNA, 22 bp, Gossypium hirsutum
ttatacacaatctaaagaactg

SEQ ID NO: 21491 - DNA, 18 bp, Gossypium hirsutum
acacaatctagagaactg

SEQ ID NO: 21492 - DNA, 28 bp, Gossypium hirsutum
cagtcaattgcaacttctctcaaagttt

SEQ ID NO: 21493 - DNA, 26 bp, Gossypium hirsutum
atgtccctatgcattaggtttggttt

SEQ ID NO: 21494 - DNA, 16 bp, Gossypium hirsutum
ccagggatagtaaatg

SEQ ID NO: 21495 - DNA, 15 bp, Gossypium hirsutum
cagggatggtaaatg

SEQ ID NO: 21496 - DNA, 32 bp, Gossypium hirsutum
aaaacttatgttgaaggatcaaagcatcaaaa

SEQ ID NO: 21497 - DNA, 27 bp, Gossypium hirsutum
cgcaccgctaattttattttgaaagtg

SEQ ID NO: 21498 - DNA, 18 bp, Gossypium hirsutum
tccttcttttgtaacttt

SEQ ID NO: 21499 - DNA, 19 bp, Gossypium hirsutum
ctccttcttttataacttt

SEQ ID NO: 21500 - DNA, 28 bp, Gossypium hirsutum
gtaaggatttgaatctcaacacctacgt

SEQ ID NO: 21501 - DNA, 29 bp, Gossypium hirsutum
cgtaatatacaccatacataccaatcggg

SEQ ID NO: 21502 - DNA, 22 bp, Gossypium hirsutum
ttggattttaatggtactaata

SEQ ID NO: 21503 - DNA, 22 bp, Gossypium hirsutum
ttggattttaatggttctaata

SEQ ID NO: 21504 - DNA, 45 bp, Gossypium hirsutum
caaaatacaaaatttctcagctaataatgaaaatcatacttaaaa

SEQ ID NO: 21505 - DNA, 34 bp, Gossypium hirsutum
cttttcctcacatctttatactacaagttctaca

SEQ ID NO: 21506 - DNA, 18 bp, Gossypium hirsutum
aatatggtgggattgatt

SEQ ID NO: 21507 - DNA, 20 bp, Gossypium hirsutum
aaaatatggtaggattgatt

SEQ ID NO: 21508 - DNA, 44 bp, Gossypium hirsutum
ggcaaaactaatggtatttaatttaataatctgttaaaagaatc

SEQ ID NO: 21509 - DNA, 25 bp, Gossypium hirsutum
ccagtcgcattgtattctccgataa

SEQ ID NO: 21510 - DNA, 18 bp, Gossypium hirsutum
tcaccatcatagcaaata

SEQ ID NO: 21511 - DNA, 16 bp, Gossypium hirsutum
accatcatggcaaata

SEQ ID NO: 21512 - DNA, 29 bp, Gossypium hirsutum
aaggatagaaattgaagatgagtgaacgt

SEQ ID NO: 21513 - DNA, 25 bp, Gossypium hirsutum
ctcagatgtggcatttgctaaactt

SEQ ID NO: 21514 - DNA, 17 bp, Gossypium hirsutum
aagtagaccggaataca

SEQ ID NO: 21515 - DNA, 17 bp, Gossypium hirsutum
aagtagaccgggataca

SEQ ID NO: 21516 - DNA, 31 bp, Gossypium hirsutum
ttattggttgaatgttgaagaaacaaagtgt

SEQ ID NO: 21517 - DNA, 24 bp, Gossypium hirsutum
caacaagtggtagccattgaaacc

SEQ ID NO: 21518 - DNA, 14 bp, Gossypium hirsutum
actagtgaaacccc

SEQ ID NO: 21519 - DNA, 13 bp, Gossypium hirsutum
ctagtgaaaaccc

SEQ ID NO: 21520 - DNA, 18 bp, Gossypium hirsutum
gatggccagacggaggtt

SEQ ID NO: 21521 - DNA, 25 bp, Gossypium hirsutum
gagcagtgcaactgtgttaacaaaa

SEQ ID NO: 21522 - DNA, 24 bp, Gossypium hirsutum
caaataaggtaaaattttgaaacc

SEQ ID NO: 21523 - DNA, 23 bp, Gossypium hirsutum
aaataaggtaaaatattgaaacc

SEQ ID NO: 21524 - DNA, 24 bp, Gossypium hirsutum
cgagttcccgacataccatgaaat

SEQ ID NO: 21525 - DNA, 34 bp, Gossypium hirsutum
tgacataattatagttgcattagtctatgttgct

SEQ ID NO: 21526 - DNA, 21 bp, Gossypium hirsutum
cttcaagaagaatagagcatt

SEQ ID NO: 21527 - DNA, 20 bp, Gossypium hirsutum
ttcaagaagaataaagcatt

SEQ ID NO: 21528 - DNA, 27 bp, Gossypium hirsutum
agcatggaatataagtggtacgacatg

SEQ ID NO: 21529 - DNA, 17 bp, Gossypium hirsutum
cgaatccgccgctcctt

SEQ ID NO: 21530 - DNA, 16 bp, Gossypium hirsutum
catggctccaccatga

SEQ ID NO: 21531 - DNA, 15 bp, Gossypium hirsutum
atggctccgccatga

SEQ ID NO: 21532 - DNA, 23 bp, Gossypium hirsutum
cgtattcttgtcggctcaaatgg

SEQ ID NO: 21533 - DNA, 34 bp, Gossypium hirsutum
cccttgtttgtacttttttagttggatattttct

SEQ ID NO: 21534 - DNA, 13 bp, Gossypium hirsutum
ctgtccaacctcg

SEQ ID NO: 21535 - DNA, 13 bp, Gossypium hirsutum
ctgtccgacctcg

SEQ ID NO: 21536 - DNA, 23 bp, Gossypium hirsutum
gccactctacttctgttgccaaa

SEQ ID NO: 21537 - DNA, 38 bp, Gossypium hirsutum
ctagcttcaaatgaaatcaaatagaacacattatgaat

SEQ ID NO: 21538 - DNA, 17 bp, Gossypium hirsutum
aatctgaccactcttca

SEQ ID NO: 21539 - DNA, 16 bp, Gossypium hirsutum
atctgaccacgcttca

SEQ ID NO: 21540 - DNA, 24 bp, Gossypium hirsutum
tttcccctgtttcactgtttgact

SEQ ID NO: 21541 - DNA, 29 bp, Gossypium hirsutum
tcatcaaacattgatctcttcgttcatct

SEQ ID NO: 21542 - DNA, 20 bp, Gossypium hirsutum
tttcttgtttcgattgtttt

SEQ ID NO: 21543 - DNA, 18 bp, Gossypium hirsutum
tcttgtttcggttgtttt

SEQ ID NO: 21544 - DNA, 25 bp, Gossypium hirsutum
gatgaaggatgagatcgatgttcga

SEQ ID NO: 21545 - DNA, 40 bp, Gossypium hirsutum
cgaaaatagattaatatattgatccaaataaacggattga

SEQ ID NO: 21546 - DNA, 17 bp, Gossypium hirsutum
aaaccattcgaaaccat

SEQ ID NO: 21547 - DNA, 14 bp, Gossypium hirsutum
ccattcgcaaccat

SEQ ID NO: 21548 - DNA, 29 bp, Gossypium hirsutum
cggtttaatcgattcaactattagaccga

SEQ ID NO: 21549 - DNA, 29 bp, Gossypium hirsutum
tgcacaaactacaatgcaattatgtttca

SEQ ID NO: 21550 - DNA, 14 bp, Gossypium hirsutum
caccctccatcttt

SEQ ID NO: 21551 - DNA, 14 bp, Gossypium hirsutum
caccctcaatcttt

SEQ ID NO: 21552 - DNA, 21 bp, Gossypium hirsutum
acccaatcacccatccaaacc

SEQ ID NO: 21553 - DNA, 25 bp, Gossypium hirsutum
ccagatggattcagttccagatctt

SEQ ID NO: 21554 - DNA, 15 bp, Gossypium hirsutum
tgtggagcagtactc

SEQ ID NO: 21555 - DNA, 13 bp, Gossypium hirsutum
tggagcagcactc

SEQ ID NO: 21556 - DNA, 25 bp, Gossypium hirsutum
aatcgtggttgtccatcaaaagaga

SEQ ID NO: 21557 - DNA, 25 bp, Gossypium hirsutum
tctcttgtttgctagtagcgtttcc

SEQ ID NO: 21558 - DNA, 18 bp, Gossypium hirsutum
ttttagggcgtttaaatt

SEQ ID NO: 21559 - DNA, 17 bp, Gossypium hirsutum
tttagggcgttttaatt

SEQ ID NO: 21560 - DNA, 33 bp, Gossypium hirsutum
aacctcataagtagcatagatcaaacatcaaaa

SEQ ID NO: 21561 - DNA, 29 bp, Gossypium hirsutum
gcatagtcctagaactactttgtgtatca

SEQ ID NO: 21562 - DNA, 17 bp, Gossypium hirsutum
aaaaggcactaggaaat

SEQ ID NO: 21563 - DNA, 16 bp, Gossypium hirsutum
aaaggcactaagaaat

SEQ ID NO: 21564 - DNA, 30 bp, Gossypium hirsutum
gttctaaaaagttgaaacaggctcattaca

SEQ ID NO: 21565 - DNA, 27 bp, Gossypium hirsutum
gctggaatttgtccatcatcgattaaa

SEQ ID NO: 21566 - DNA, 18 bp, Gossypium hirsutum
tttccttttgctattttt

SEQ ID NO: 21567 - DNA, 19 bp, Gossypium hirsutum
ttttccttttcctattttt

SEQ ID NO: 21568 - DNA, 25 bp, Gossypium hirsutum
tgatccacaagccaatacgaattga

SEQ ID NO: 21569 - DNA, 34 bp, Gossypium hirsutum
ttggccatgcatgtataacttttatttttctaaa

SEQ ID NO: 21570 - DNA, 26 bp, Gossypium hirsutum
aatttataacaaaaagaataaattat

SEQ ID NO: 21571 - DNA, 23 bp, Gossypium hirsutum
ttataacaaaaagaataaatcat

SEQ ID NO: 21572 - DNA, 33 bp, Gossypium hirsutum
cccatttaaaatataagttcaatccaagctcaa

SEQ ID NO: 21573 - DNA, 29 bp, Gossypium hirsutum
agtcactagactgttaaaatcgttgttgt

SEQ ID NO: 21574 - DNA, 19 bp, Gossypium hirsutum
tctcttctgttcacaccgg

SEQ ID NO: 21575 - DNA, 18 bp, Gossypium hirsutum
ctcttctgttcgcaccgg

SEQ ID NO: 21576 - DNA, 34 bp, Gossypium hirsutum
cagattgataacgttcaaagctatttcataagaa

SEQ ID NO: 21577 - DNA, 25 bp, Gossypium hirsutum
gcaatcctaaccgcaagtatttgtg

SEQ ID NO: 21578 - DNA, 20 bp, Gossypium hirsutum
ctagtcaatcgtacataaca

SEQ ID NO: 21579 - DNA, 19 bp, Gossypium hirsutum
tagtcaatcgtacttaaca

SEQ ID NO: 21580 - DNA, 29 bp, Gossypium hirsutum
gtagccttttgaatggtaagatttgttgt

SEQ ID NO: 21581 - DNA, 25 bp, Gossypium hirsutum
gttgttccgttgatttgtgctaagt

SEQ ID NO: 21582 - DNA, 20 bp, Gossypium hirsutum
catccctctaaataccaatt

SEQ ID NO: 21583 - DNA, 20 bp, Gossypium hirsutum
catccctctaaattccaatt

SEQ ID NO: 21584 - DNA, 33 bp, Gossypium hirsutum
gaaaacatcaagattttcttttgaaccaaaaca

SEQ ID NO: 21585 - DNA, 25 bp, Gossypium hirsutum
aggtttctcggcaaattggacttaa

SEQ ID NO: 21586 - DNA, 19 bp, Gossypium hirsutum
cataataaccgacacaacg

SEQ ID NO: 21587 - DNA, 16 bp, Gossypium hirsutum
aataaccgaaacaacg

SEQ ID NO: 21588 - DNA, 22 bp, Gossypium hirsutum
gcaagaaagtccctggcatgat

SEQ ID NO: 21589 - DNA, 24 bp, Gossypium hirsutum
gatttccagtattgcagccttgtt

SEQ ID NO: 21590 - DNA, 20 bp, Gossypium hirsutum
aaaacctgttgtctcctaag

SEQ ID NO: 21591 - DNA, 18 bp, Gossypium hirsutum
aacctgttgtcccctaag

SEQ ID NO: 21592 - DNA, 27 bp, Gossypium hirsutum
ttcagtaaagattccggtatcgaactc

SEQ ID NO: 21593 - DNA, 25 bp, Gossypium hirsutum
ggcagtggtggtgagattagatatt

SEQ ID NO: 21594 - DNA, 22 bp, Gossypium hirsutum
aaaactctctccatatatatat

SEQ ID NO: 21595 - DNA, 21 bp, Gossypium hirsutum
aaactctctcgatatatatat

SEQ ID NO: 21596 - DNA, 25 bp, Gossypium hirsutum
ggtcaccactattcttcacatgcta

SEQ ID NO: 21597 - DNA, 25 bp, Gossypium hirsutum
gcttctggtagtctggaattttgtg

SEQ ID NO: 21598 - DNA, 13 bp, Gossypium hirsutum
cccagagaaaagc

SEQ ID NO: 21599 - DNA, 13 bp, Gossypium hirsutum
cccaaagaaaagc

SEQ ID NO: 21600 - DNA, 26 bp, Gossypium hirsutum
ccttcacatattttctggcagacttg

SEQ ID NO: 21601 - DNA, 27 bp, Gossypium hirsutum
ggaaaacaaaaagtgaaagaggtccaa

SEQ ID NO: 21602 - DNA, 18 bp, Gossypium hirsutum
caatctggaatgtgagcc

SEQ ID NO: 21603 - DNA, 18 bp, Gossypium hirsutum
caatctggaatgtgaacc

SEQ ID NO: 21604 - DNA, 25 bp, Gossypium hirsutum
gtcaatttgttgtagttccccgttt

SEQ ID NO: 21605 - DNA, 29 bp, Gossypium hirsutum
caattattctcctaccatagcaacgtcaa

SEQ ID NO: 21606 - DNA, 17 bp, Gossypium hirsutum
tagaccctgtaaactat

SEQ ID NO: 21607 - DNA, 17 bp, Gossypium hirsutum
tagaccctctaaactat

SEQ ID NO: 21608 - DNA, 28 bp, Gossypium hirsutum
gggtgtggttgaaatcagtaaatagtgt

SEQ ID NO: 21609 - DNA, 25 bp, Gossypium hirsutum
gccgatgccattaaagaaacttgaa

SEQ ID NO: 21610 - DNA, 16 bp, Gossypium hirsutum
cgattgggatggttaa

SEQ ID NO: 21611 - DNA, 17 bp, Gossypium hirsutum
ccgattgggatagttaa

SEQ ID NO: 21612 - DNA, 42 bp, Gossypium hirsutum
cttgctctttataaataaatatcaatacaagaatcggaaaat

SEQ ID NO: 21613 - DNA, 24 bp, Gossypium hirsutum
gcagacgcctgtgagtgtataaaa

SEQ ID NO: 21614 - DNA, 20 bp, Gossypium hirsutum
ttgtgattttgatatgaacc

SEQ ID NO: 21615 - DNA, 20 bp, Gossypium hirsutum
ttgtgattttgatacgaacc

SEQ ID NO: 21616 - DNA, 26 bp, Gossypium hirsutum
ccttttgacagtctagtggtgattct

SEQ ID NO: 21617 - DNA, 28 bp, Gossypium hirsutum
cactagagagcttgctatgtaaacaact

SEQ ID NO: 21618 - DNA, 23 bp, Gossypium hirsutum
ttaaagaaaaagaaaataaaaat

SEQ ID NO: 21619 - DNA, 21 bp, Gossypium hirsutum
aaagaaaaagaaattaaaaat

SEQ ID NO: 21620 - DNA, 26 bp, Gossypium hirsutum
catactattgcaggattagcggtgtt

SEQ ID NO: 21621 - DNA, 24 bp, Gossypium hirsutum
accataaggtgtggcgtttatcac

SEQ ID NO: 21622 - DNA, 21 bp, Gossypium hirsutum
aaaataggaaccttcggtatt

SEQ ID NO: 21623 - DNA, 20 bp, Gossypium hirsutum
aaataggaaccttcgatatt

SEQ ID NO: 21624 - DNA, 25 bp, Gossypium hirsutum
cttgcttaaaaccgagaccctctat

SEQ ID NO: 21625 - DNA, 27 bp, Gossypium hirsutum
tgtgccatacttatgccataacttcaa

SEQ ID NO: 21626 - DNA, 14 bp, Gossypium hirsutum
catggccggccact

SEQ ID NO: 21627 - DNA, 14 bp, Gossypium hirsutum
catggctggccact

SEQ ID NO: 21628 - DNA, 25 bp, Gossypium hirsutum
gcatgtcaaactccccattttatgt

SEQ ID NO: 21629 - DNA, 25 bp, Gossypium hirsutum
gttgaaaccatgcatccatttccat

SEQ ID NO: 21630 - DNA, 20 bp, Gossypium hirsutum
tttctctctctcacacacac

SEQ ID NO: 21631 - DNA, 20 bp, Gossypium hirsutum
tttctctctctctcacacac

SEQ ID NO: 21632 - DNA, 29 bp, Gossypium hirsutum
tgtgacatcaaatccagatatcaaaagga

SEQ ID NO: 21633 - DNA, 22 bp, Gossypium hirsutum
gacaaatgggaccgttctagct

SEQ ID NO: 21634 - DNA, 16 bp, Gossypium hirsutum
aatggtcggtttccag

SEQ ID NO: 21635 - DNA, 15 bp, Gossypium hirsutum
atggtcgatttccag

SEQ ID NO: 21636 - DNA, 26 bp, Gossypium hirsutum
cagcatacagacaggtcaaaaattgt

SEQ ID NO: 21637 - DNA, 40 bp, Gossypium hirsutum
acctgtccatgtcttttggatttttaatattatttttaag

SEQ ID NO: 21638 - DNA, 24 bp, Gossypium hirsutum
taacattataataaacctaaattt

SEQ ID NO: 21639 - DNA, 24 bp, Gossypium hirsutum
taacattataataaacttaaattt

SEQ ID NO: 21640 - DNA, 30 bp, Gossypium hirsutum
tcaggttcaatcattagcactgttaaaact

SEQ ID NO: 21641 - DNA, 24 bp, Gossypium hirsutum
caagcttgtggctgtagtttagtg

SEQ ID NO: 21642 - DNA, 14 bp, Gossypium hirsutum
aacgtggaattctt

SEQ ID NO: 21643 - DNA, 14 bp, Gossypium hirsutum
aacgtgaaattctt

SEQ ID NO: 21644 - DNA, 18 bp, Gossypium hirsutum
gtggctgctgggattcga

SEQ ID NO: 21645 - DNA, 29 bp, Gossypium hirsutum
ggcatgattatgatgaaatgtgaacaagt

SEQ ID NO: 21646 - DNA, 22 bp, Gossypium hirsutum
tttttacttgctcttttctgct

SEQ ID NO: 21647 - DNA, 21 bp, Gossypium hirsutum
ttttacttgctctttactgct

SEQ ID NO: 21648 - DNA, 25 bp, Gossypium hirsutum
ctgtgtctatatctgcatgccttga

SEQ ID NO: 21649 - DNA, 23 bp, Gossypium hirsutum
gtttacatctgcgagtgcaatgg

SEQ ID NO: 21650 - DNA, 14 bp, Gossypium hirsutum
ccacctcgggaagg

SEQ ID NO: 21651 - DNA, 14 bp, Gossypium hirsutum
ccacctcaggaagg

SEQ ID NO: 21652 - DNA, 30 bp, Gossypium hirsutum
tgatcttaatgacttgcttccaatactctg

SEQ ID NO: 21653 - DNA, 25 bp, Gossypium hirsutum
gtcatgatgttccacttccatgttg

SEQ ID NO: 21654 - DNA, 18 bp, Gossypium hirsutum
tccatcagcacctataaa

SEQ ID NO: 21655 - DNA, 16 bp, Gossypium hirsutum
catcagcacatataaa

SEQ ID NO: 21656 - DNA, 28 bp, Gossypium hirsutum
gccacaatcaaaagtaaaactagcacat

SEQ ID NO: 21657 - DNA, 29 bp, Gossypium hirsutum
gcaagttacacacttctactatctcttca

SEQ ID NO: 21658 - DNA, 19 bp, Gossypium hirsutum
ttgccatatacaattattt

SEQ ID NO: 21659 - DNA, 20 bp, Gossypium hirsutum
tttgccatatactattattt

SEQ ID NO: 21660 - DNA, 34 bp, Gossypium hirsutum
cagataagatatgaaagactttggaggtgtataa

SEQ ID NO: 21661 - DNA, 22 bp, Gossypium hirsutum
cacagattcgcaaatgcacact

SEQ ID NO: 21662 - DNA, 16 bp, Gossypium hirsutum
caggtaagggatctct

SEQ ID NO: 21663 - DNA, 16 bp, Gossypium hirsutum
caggtaagagatctct

SEQ ID NO: 21664 - DNA, 21 bp, Gossypium hirsutum
gccgattcacctcctctccta

SEQ ID NO: 21665 - DNA, 27 bp, Gossypium hirsutum
gcaatttatggtgtctgaaagttgtga

SEQ ID NO: 21666 - DNA, 20 bp, Gossypium hirsutum
aaatacatcatttgaatatc

SEQ ID NO: 21667 - DNA, 15 bp, Gossypium hirsutum
catcattcgaatatc

SEQ ID NO: 21668 - DNA, 32 bp, Gossypium hirsutum
acaaccattaggcattatattaaaccaactct

SEQ ID NO: 21669 - DNA, 15 bp, Gossypium hirsutum
ggcgtgctggtgtgg

SEQ ID NO: 21670 - DNA, 20 bp, Gossypium hirsutum
catcactactcctacacgca

SEQ ID NO: 21671 - DNA, 17 bp, Gossypium hirsutum
cactactcccacacgca

SEQ ID NO: 21672 - DNA, 21 bp, Gossypium hirsutum
ccgtgttgctaattgcttcca

SEQ ID NO: 21673 - DNA, 24 bp, Gossypium hirsutum
caaagtggattacctgctggtcat

SEQ ID NO: 21674 - DNA, 14 bp, Gossypium hirsutum
cggcatgggttatt

SEQ ID NO: 21675 - DNA, 15 bp, Gossypium hirsutum
ttcggcatggttatt

SEQ ID NO: 21676 - DNA, 24 bp, Gossypium hirsutum
aatgctgaaggttggagattgcta

SEQ ID NO: 21677 - DNA, 21 bp, Gossypium hirsutum
accaatccccatcgccttatg

SEQ ID NO: 21678 - DNA, 18 bp, Gossypium hirsutum
caaacacctccaccatgg

SEQ ID NO: 21679 - DNA, 15 bp, Gossypium hirsutum
acacctccgccatgg

SEQ ID NO: 21680 - DNA, 21 bp, Gossypium hirsutum
ctgcggaggtgtttgcattac

SEQ ID NO: 21681 - DNA, 39 bp, Gossypium hirsutum
cgattatttatttatgttagatttcgagcataagtttga

SEQ ID NO: 21682 - DNA, 25 bp, Gossypium hirsutum
ctaattaataataaggataaacaac

SEQ ID NO: 21683 - DNA, 21 bp, Gossypium hirsutum
ttaataataagggtaaacaac

SEQ ID NO: 21684 - DNA, 41 bp, Gossypium hirsutum
gataaaaacgtaaacttacaaatattttaatgattttgggt

SEQ ID NO: 21685 - DNA, 33 bp, Gossypium hirsutum
cgaggatgctatatcagtacagttaataaacat

SEQ ID NO: 21686 - DNA, 23 bp, Gossypium hirsutum
aatttttttctcttttaattttt

SEQ ID NO: 21687 - DNA, 22 bp, Gossypium hirsutum
atttttttctcttataattttt

SEQ ID NO: 21688 - DNA, 33 bp, Gossypium hirsutum
ccattcgtctcgtagttgttaataataggaata

SEQ ID NO: 21689 - DNA, 34 bp, Gossypium hirsutum
tgttcagaaaattagtgccattttttttatcaca

SEQ ID NO: 21690 - DNA, 23 bp, Gossypium hirsutum
aaattaacatatttgtttttttg

SEQ ID NO: 21691 - DNA, 22 bp, Gossypium hirsutum
aaattaacatatttgttttttg

SEQ ID NO: 21692 - DNA, 32 bp, Gossypium hirsutum
gatcaacgtttctaacttttatcatttgggaa

SEQ ID NO: 21693 - DNA, 30 bp, Gossypium hirsutum
tctccactcagtattaagttatgtggatga

SEQ ID NO: 21694 - DNA, 18 bp, Gossypium hirsutum
acaggttcatttaagtcc

SEQ ID NO: 21695 - DNA, 18 bp, Gossypium hirsutum
acaggttcatttgagtcc

SEQ ID NO: 21696 - DNA, 25 bp, Gossypium hirsutum
cgaggttgactctacagaaacagaa

SEQ ID NO: 21697 - DNA, 27 bp, Gossypium hirsutum
gctaaatatctttgagcagtgctagct

SEQ ID NO: 21698 - DNA, 20 bp, Gossypium hirsutum
tatcaaccaaatccgagacc

SEQ ID NO: 21699 - DNA, 17 bp, Gossypium hirsutum
caaccaaaaccgagacc

SEQ ID NO: 21700 - DNA, 26 bp, Gossypium hirsutum
cgagtcaaatgcttttgaagaactca

SEQ ID NO: 21701 - DNA, 34 bp, Gossypium hirsutum
gctgttaaagcactttacattttacaaatttctg

SEQ ID NO: 21702 - DNA, 15 bp, Gossypium hirsutum
cctgtgaactaattc

SEQ ID NO: 21703 - DNA, 15 bp, Gossypium hirsutum
cctgtgaaataattc

SEQ ID NO: 21704 - DNA, 34 bp, Gossypium hirsutum
caacactattataagaagtggttatacatgcact

SEQ ID NO: 21705 - DNA, 21 bp, Gossypium hirsutum
caggttccagtaagggacagc

SEQ ID NO: 21706 - DNA, 15 bp, Gossypium hirsutum
catttgcatcggccc

SEQ ID NO: 21707 - DNA, 15 bp, Gossypium hirsutum
catttgcttcggccc

SEQ ID NO: 21708 - DNA, 23 bp, Gossypium hirsutum
acgacgattgcacttgataccaa

SEQ ID NO: 21709 - DNA, 47 bp, Gossypium hirsutum
catttttcttcacctatttattaacaaatgagtatattttatacgtt

SEQ ID NO: 21710 - DNA, 25 bp, Gossypium hirsutum
atcaaataatgatatatgacgtgcc

SEQ ID NO: 21711 - DNA, 21 bp, Gossypium hirsutum
aataatgatatgtgacgtgcc

SEQ ID NO: 21712 - DNA, 25 bp, Gossypium hirsutum
gtatccaaatggctgcatgctttaa

SEQ ID NO: 21713 - DNA, 25 bp, Gossypium hirsutum
ccggaacccaaaccaagaaaataat

SEQ ID NO: 21714 - DNA, 18 bp, Gossypium hirsutum
atgtgtggattggcataa

SEQ ID NO: 21715 - DNA, 18 bp, Gossypium hirsutum
atgtgtggattgacataa

SEQ ID NO: 21716 - DNA, 34 bp, Gossypium hirsutum
tgttacataatctgttcattttgactacttctgt

SEQ ID NO: 21717 - DNA, 30 bp, Gossypium hirsutum
gatcaaattacacaatgtgttgtttagggt

SEQ ID NO: 21718 - DNA, 23 bp, Gossypium hirsutum
ttaagtgattactagtataattt

SEQ ID NO: 21719 - DNA, 20 bp, Gossypium hirsutum
agtgattactagtgtaattt

SEQ ID NO: 21720 - DNA, 44 bp, Gossypium hirsutum
gtttgatgtaacgttttaccaatattaatgaatttatttctttt

SEQ ID NO: 21721 - DNA, 23 bp, Gossypium hirsutum
ttctgcccaaatgtcatccaaga

SEQ ID NO: 21722 - DNA, 16 bp, Gossypium hirsutum
aaccagaaccctcttc

SEQ ID NO: 21723 - DNA, 17 bp, Gossypium hirsutum
caaccagaatcctcttc

SEQ ID NO: 21724 - DNA, 25 bp, Gossypium hirsutum
gcacttcgactacgagaaagattga

SEQ ID NO: 21725 - DNA, 26 bp, Gossypium hirsutum
gctcggttgataattctagtgtttgg

SEQ ID NO: 21726 - DNA, 19 bp, Gossypium hirsutum
ttgactaatggaaagagag

SEQ ID NO: 21727 - DNA, 18 bp, Gossypium hirsutum
tgactaatggagagagag

SEQ ID NO: 21728 - DNA, 23 bp, Gossypium hirsutum
acatctcggacaatggctttcat

SEQ ID NO: 21729 - DNA, 26 bp, Gossypium hirsutum
gcctatagcttttcagcattgtagct

SEQ ID NO: 21730 - DNA, 18 bp, Gossypium hirsutum
catgagtatcaattttta

SEQ ID NO: 21731 - DNA, 18 bp, Gossypium hirsutum
catgagtatcatttttta

SEQ ID NO: 21732 - DNA, 30 bp, Gossypium hirsutum
ggtccaattttattttgtttcctctacact

SEQ ID NO: 21733 - DNA, 29 bp, Gossypium hirsutum
tcatataagtaaccatttgcgttcctcat

SEQ ID NO: 21734 - DNA, 16 bp, Gossypium hirsutum
accgaaccaatccaat

SEQ ID NO: 21735 - DNA, 15 bp, Gossypium hirsutum
ccgaaccgatccaat

SEQ ID NO: 21736 - DNA, 31 bp, Gossypium hirsutum
cttgattatgtattttgaatggagggttgtc

SEQ ID NO: 21737 - DNA, 22 bp, Gossypium hirsutum
ccctttgatcgtgacgtgcata

SEQ ID NO: 21738 - DNA, 19 bp, Gossypium hirsutum
tgtaaaggattttgaaccc

SEQ ID NO: 21739 - DNA, 19 bp, Gossypium hirsutum
tgtaaaggattttcaaccc

SEQ ID NO: 21740 - DNA, 25 bp, Gossypium hirsutum
tgtggaaatgacctttggcgataat

SEQ ID NO: 21741 - DNA, 20 bp, Gossypium hirsutum
ccgtgtgccattgttaagca

SEQ ID NO: 21742 - DNA, 17 bp, Gossypium hirsutum
tgacaatagacaatttt

SEQ ID NO: 21743 - DNA, 20 bp, Gossypium hirsutum
atttgacaatagacagtttt

SEQ ID NO: 21744 - DNA, 28 bp, Gossypium hirsutum
cagcttgtagtgtgaaagataagactca

SEQ ID NO: 21745 - DNA, 27 bp, Gossypium hirsutum
gcaaacaagaaggaaaatgagtgatct

SEQ ID NO: 21746 - DNA, 15 bp, Gossypium hirsutum
cattgccccagtctc

SEQ ID NO: 21747 - DNA, 14 bp, Gossypium hirsutum
attgccccactctc

SEQ ID NO: 21748 - DNA, 24 bp, Gossypium hirsutum
caccgtacgcttactcattgtcat

SEQ ID NO: 21749 - DNA, 27 bp, Gossypium hirsutum
ccgtcgcttcaaaaagtgtctttaaaa

SEQ ID NO: 21750 - DNA, 23 bp, Gossypium hirsutum
ctttataaatcgtcttcaataag

SEQ ID NO: 21751 - DNA, 16 bp, Gossypium hirsutum
aatcgtcttcaaaaag

SEQ ID NO: 21752 - DNA, 25 bp, Gossypium hirsutum
acgtttcacgcgtctaagtttatct

SEQ ID NO: 21753 - DNA, 28 bp, Gossypium hirsutum
cctgaaaagaaagttttactggcatcaa

SEQ ID NO: 21754 - DNA, 16 bp, Gossypium hirsutum
aagcattccaaaataa

SEQ ID NO: 21755 - DNA, 18 bp, Gossypium hirsutum
caaagcattccataataa

SEQ ID NO: 21756 - DNA, 29 bp, Gossypium hirsutum
aaacatttctgcattgtaattggtagcaa

SEQ ID NO: 21757 - DNA, 36 bp, Gossypium hirsutum
caagtgtctaattgattaatacttttgctagtttgg

SEQ ID NO: 21758 - DNA, 16 bp, Gossypium hirsutum
cacaagacattaaaag

SEQ ID NO: 21759 - DNA, 16 bp, Gossypium hirsutum
cacaagacaataaaag

SEQ ID NO: 21760 - DNA, 29 bp, Gossypium hirsutum
tggatgaaattagagattggtaccaccta

SEQ ID NO: 21761 - DNA, 26 bp, Gossypium hirsutum
attgttgtagatttcccggataacga

SEQ ID NO: 21762 - DNA, 16 bp, Gossypium hirsutum
aacgtctgccgtcgaa

SEQ ID NO: 21763 - DNA, 16 bp, Gossypium hirsutum
aacgtctgccctcgaa

SEQ ID NO: 21764 - DNA, 20 bp, Gossypium hirsutum
gtgtggaggaaggcaaaagc

SEQ ID NO: 21765 - DNA, 31 bp, Gossypium hirsutum
cccttcaatacatggaaaaacttagaaaaca

SEQ ID NO: 21766 - DNA, 14 bp, Gossypium hirsutum
tttgggcgagtttc

SEQ ID NO: 21767 - DNA, 13 bp, Gossypium hirsutum
ttgggcaagtttc

SEQ ID NO: 21768 - DNA, 25 bp, Gossypium hirsutum
gatattcgagcccatgttacttgga

SEQ ID NO: 21769 - DNA, 24 bp, Gossypium hirsutum
tttctaccgttggcttgttgtagt

SEQ ID NO: 21770 - DNA, 23 bp, Gossypium hirsutum
ctgtttctcttttttttctcgca

SEQ ID NO: 21771 - DNA, 22 bp, Gossypium hirsutum
ctgtttctctttttttctcgca

SEQ ID NO: 21772 - DNA, 22 bp, Gossypium hirsutum
ggccatctatacgtcagtcgaa

SEQ ID NO: 21773 - DNA, 32 bp, Gossypium hirsutum
tcattcttatttttgttttcctcgaaaatgga

SEQ ID NO: 21774 - DNA, 22 bp, Gossypium hirsutum
aatatatctgattaaaaatttt

SEQ ID NO: 21775 - DNA, 16 bp, Gossypium hirsutum
tctgattgaaaatttt

SEQ ID NO: 21776 - DNA, 38 bp, Gossypium hirsutum
cagggtacaggaattaatatttgaaacattgtttaaaa

SEQ ID NO: 21777 - DNA, 29 bp, Gossypium hirsutum
cacggtttacgccatataccatatatgat

SEQ ID NO: 21778 - DNA, 16 bp, Gossypium hirsutum
cacaagagtggatcaa

SEQ ID NO: 21779 - DNA, 16 bp, Gossypium hirsutum
cacaagagtagatcaa

SEQ ID NO: 21780 - DNA, 32 bp, Gossypium hirsutum
cgataaacttttgcagtaattttatcggagtt

SEQ ID NO: 21781 - DNA, 19 bp, Gossypium hirsutum
tggcatgagtgacgctgtt

SEQ ID NO: 21782 - DNA, 15 bp, Gossypium hirsutum
caaacccgaaattat

SEQ ID NO: 21783 - DNA, 14 bp, Gossypium hirsutum
aaacccggaattat

SEQ ID NO: 21784 - DNA, 35 bp, Gossypium hirsutum
tctccattccacatctttaatttatataacatgct

SEQ ID NO: 21785 - DNA, 25 bp, Gossypium hirsutum
tggaaacacacatactttcgaacct

SEQ ID NO: 21786 - DNA, 18 bp, Gossypium hirsutum
cttactaatgcaaaataa

SEQ ID NO: 21787 - DNA, 17 bp, Gossypium hirsutum
ttactaatgcgaaataa

SEQ ID NO: 21788 - DNA, 24 bp, Gossypium hirsutum
tctttcacttcgatgccaatagca

SEQ ID NO: 21789 - DNA, 27 bp, Gossypium hirsutum
aaggttgtgatcagcatggatatttct

SEQ ID NO: 21790 - DNA, 16 bp, Gossypium hirsutum
ctgtcaggtaaccagc

SEQ ID NO: 21791 - DNA, 16 bp, Gossypium hirsutum
ctgtcaggttaccagc

SEQ ID NO: 21792 - DNA, 22 bp, Gossypium hirsutum
gagatccccattgatggtgctt

SEQ ID NO: 21793 - DNA, 26 bp, Gossypium hirsutum
gaagagtcgagtcgtatgtaaattgc

SEQ ID NO: 21794 - DNA, 17 bp, Gossypium hirsutum
aaacctaacgtaacttc

SEQ ID NO: 21795 - DNA, 19 bp, Gossypium hirsutum
ctaaacctaacataacttc

SEQ ID NO: 21796 - DNA, 25 bp, Gossypium hirsutum
gtacccctctttctactttgaccat

SEQ ID NO: 21797 - DNA, 38 bp, Gossypium hirsutum
ggtttgatgatgttagattttctgatattttgattgaa

SEQ ID NO: 21798 - DNA, 20 bp, Gossypium hirsutum
tcattgtttcccttgtaaaa

SEQ ID NO: 21799 - DNA, 20 bp, Gossypium hirsutum
ctcattgtttccttgtaaaa

SEQ ID NO: 21800 - DNA, 31 bp, Gossypium hirsutum
atgctatggagcttgaaaatacaattgattg

SEQ ID NO: 21801 - DNA, 31 bp, Gossypium hirsutum
atcttcaaatacgtataacatcaccatttgc

SEQ ID NO: 21802 - DNA, 23 bp, Gossypium hirsutum
tttatttcacaatttaatccttc

SEQ ID NO: 21803 - DNA, 22 bp, Gossypium hirsutum
ttatttcacaatttagtccttc

SEQ ID NO: 21804 - DNA, 29 bp, Gossypium hirsutum
tgtgattgagctgtaataaatgaggagtt

SEQ ID NO: 21805 - DNA, 30 bp, Gossypium hirsutum
tggcttgtggtttttatttattttacggtt

SEQ ID NO: 21806 - DNA, 21 bp, Gossypium hirsutum
aagtatcgaaattaaatttaa

SEQ ID NO: 21807 - DNA, 20 bp, Gossypium hirsutum
agtatcgaaattaaattcaa

SEQ ID NO: 21808 - DNA, 27 bp, Gossypium hirsutum
gggtaacataccatttgctacttttgg

SEQ ID NO: 21809 - DNA, 25 bp, Gossypium hirsutum
agattcgggtcgagtctaagtatga

SEQ ID NO: 21810 - DNA, 20 bp, Gossypium hirsutum
ctaaaatggatttcaataaa

SEQ ID NO: 21811 - DNA, 20 bp, Gossypium hirsutum
ctaaaatggatttaaataaa

SEQ ID NO: 21812 - DNA, 36 bp, Gossypium hirsutum
gcccggtctgacttatttttaattttataattcttt

SEQ ID NO: 21813 - DNA, 26 bp, Gossypium hirsutum
aaatgttccttttggtgtcaaacagg

SEQ ID NO: 21814 - DNA, 23 bp, Gossypium hirsutum
ataactacttcaatctttatttg

SEQ ID NO: 21815 - DNA, 19 bp, Gossypium hirsutum
ctacttcagtctttatttg

SEQ ID NO: 21816 - DNA, 29 bp, Gossypium hirsutum
tctctctaaaagagaaagagaggttggat

SEQ ID NO: 21817 - DNA, 23 bp, Gossypium hirsutum
tccagagaggaagcaagatctga

SEQ ID NO: 21818 - DNA, 19 bp, Gossypium hirsutum
cataaactctacgttaacc

SEQ ID NO: 21819 - DNA, 20 bp, Gossypium hirsutum
ccataaactctatgttaacc

SEQ ID NO: 21820 - DNA, 31 bp, Gossypium hirsutum
tggaacttgtaagtctaattttttggtgtct

SEQ ID NO: 21821 - DNA, 23 bp, Gossypium hirsutum
gtcaacagggaggtcaacactac

SEQ ID NO: 21822 - DNA, 17 bp, Gossypium hirsutum
cttcatcacgcgtatta

SEQ ID NO: 21823 - DNA, 18 bp, Gossypium hirsutum
ccttcatcaagcgtatta

SEQ ID NO: 21824 - DNA, 44 bp, Gossypium hirsutum
gatgtgaaaaagattaggtaatgtataagaaactaaactaaatt

SEQ ID NO: 21825 - DNA, 29 bp, Gossypium hirsutum
cgaagttaacaaaacaccattcatatcga

SEQ ID NO: 21826 - DNA, 16 bp, Gossypium hirsutum
aatctttgcacaattt

SEQ ID NO: 21827 - DNA, 18 bp, Gossypium hirsutum
tcaatctttacacaattt

SEQ ID NO: 21828 - DNA, 50 bp, Gossypium hirsutum
cctgcttattctattagttatatgcattacaaaattatattttattttct

SEQ ID NO: 21829 - DNA, 28 bp, Gossypium hirsutum
gataatatttccaacccttaggcttggt

SEQ ID NO: 21830 - DNA, 20 bp, Gossypium hirsutum
ctaaacaatagtcatatttc

SEQ ID NO: 21831 - DNA, 22 bp, Gossypium hirsutum
ttctaaacaatagtcctatttc

SEQ ID NO: 21832 - DNA, 30 bp, Gossypium hirsutum
gaagttctgcatattactctggaagtttct

SEQ ID NO: 21833 - DNA, 29 bp, Gossypium hirsutum
gcgttaacatactcaaaccaacatattcc

SEQ ID NO: 21834 - DNA, 21 bp, Gossypium hirsutum
ctttttgaaaaatggattaag

SEQ ID NO: 21835 - DNA, 21 bp, Gossypium hirsutum
ctttttgaaaaatagattaag

SEQ ID NO: 21836 - DNA, 33 bp, Gossypium hirsutum
acaaaaaaaaatcactttcaaatttccaacctt

SEQ ID NO: 21837 - DNA, 25 bp, Gossypium hirsutum
tcttgggatagcttaaaaccagcat

SEQ ID NO: 21838 - DNA, 22 bp, Gossypium hirsutum
agaagcaagatattactcacct

SEQ ID NO: 21839 - DNA, 20 bp, Gossypium hirsutum
aagcaagatattgctcacct

SEQ ID NO: 21840 - DNA, 25 bp, Gossypium hirsutum
acctttactgtcagcatgtgaaact

SEQ ID NO: 21841 - DNA, 38 bp, Gossypium hirsutum
gttcactaagttagtaggattagtttatgatttgagtt

SEQ ID NO: 21842 - DNA, 19 bp, Gossypium hirsutum
ctgatatgtcaactatctt

SEQ ID NO: 21843 - DNA, 19 bp, Gossypium hirsutum
ctgatatgtcagctatctt

SEQ ID NO: 21844 - DNA, 29 bp, Gossypium hirsutum
gctcccactaatacaagactaaattttgc

SEQ ID NO: 21845 - DNA, 25 bp, Gossypium hirsutum
cctctcttgttgccaaacattgaat

SEQ ID NO: 21846 - DNA, 17 bp, Gossypium hirsutum
aggttttaccaatgtcc

SEQ ID NO: 21847 - DNA, 18 bp, Gossypium hirsutum
aaggttttaccgatgtcc

SEQ ID NO: 21848 - DNA, 28 bp, Gossypium hirsutum
aaaaacccaacaacatatgacaattgct

SEQ ID NO: 21849 - DNA, 35 bp, Gossypium hirsutum
tccagaaaagtaaatcattttcaggaaatcatttt

SEQ ID NO: 21850 - DNA, 18 bp, Gossypium hirsutum
ccagtaaaatgtttttcg

SEQ ID NO: 21851 - DNA, 18 bp, Gossypium hirsutum
ccagtaaaatatttttcg

SEQ ID NO: 21852 - DNA, 25 bp, Gossypium hirsutum
catgagcaataagggttcgtttgtt

SEQ ID NO: 21853 - DNA, 40 bp, Gossypium hirsutum
gtgaattaaatatcttaatgcgtgtcaatttttaaatgtt

SEQ ID NO: 21854 - DNA, 22 bp, Gossypium hirsutum
tgagtttaaaaaaaaatttgag

SEQ ID NO: 21855 - DNA, 21 bp, Gossypium hirsutum
tgagtttaaaaaaaatttgag

SEQ ID NO: 21856 - DNA, 32 bp, Gossypium hirsutum
ggtaacagatcttaacagcaaaataacaaaca

SEQ ID NO: 21857 - DNA, 28 bp, Gossypium hirsutum
acgttcatcatttgttcaagtctatgga

SEQ ID NO: 21858 - DNA, 19 bp, Gossypium hirsutum
cacatcctgatagctacat

SEQ ID NO: 21859 - DNA, 17 bp, Gossypium hirsutum
catcctgatggctacat

SEQ ID NO: 21860 - DNA, 25 bp, Gossypium hirsutum
gcgaagtcataaacaagaagagcaa

SEQ ID NO: 21861 - DNA, 25 bp, Gossypium hirsutum
cctgcacaaaacgtttacagagaat

SEQ ID NO: 21862 - DNA, 20 bp, Gossypium hirsutum
ttttcccttacaacatacac

SEQ ID NO: 21863 - DNA, 19 bp, Gossypium hirsutum
tttcccttacaacttacac

SEQ ID NO: 21864 - DNA, 25 bp, Gossypium hirsutum
ggctttcacttgtcgataggtttca

SEQ ID NO: 21865 - DNA, 30 bp, Gossypium hirsutum
gcgaacctttgttgtacttaaaaaaattgg

SEQ ID NO: 21866 - DNA, 23 bp, Gossypium hirsutum
ttgtttttcaaaactataactag

SEQ ID NO: 21867 - DNA, 20 bp, Gossypium hirsutum
tttttcaaaaccataactag

SEQ ID NO: 21868 - DNA, 28 bp, Gossypium hirsutum
aatccacataatgtacacctccatgttt

SEQ ID NO: 21869 - DNA, 32 bp, Gossypium hirsutum
accaagttttctcttacagaattcttgtgata

SEQ ID NO: 21870 - DNA, 19 bp, Gossypium hirsutum
tttccaacaattacttctg

SEQ ID NO: 21871 - DNA, 16 bp, Gossypium hirsutum
ccaacaattgcttctg

SEQ ID NO: 21872 - DNA, 32 bp, Gossypium hirsutum
ccaaaaattgagcattcactaattacaaagtg

SEQ ID NO: 21873 - DNA, 53 bp, Gossypium hirsutum
ggtattcttatattgataaatgtaagagatgactaaaaactaaaaataaaatc

SEQ ID NO: 21874 - DNA, 25 bp, Gossypium hirsutum
aaaactataaaagatacagataaaa

SEQ ID NO: 21875 - DNA, 21 bp, Gossypium hirsutum
ctataaaagatacggataaaa

SEQ ID NO: 21876 - DNA, 31 bp, Gossypium hirsutum
tgtccttgttcaacattatgtttgtgaattt

SEQ ID NO: 21877 - DNA, 34 bp, Gossypium hirsutum
tgcagtatagtattaggttagtagttgatgttgt

SEQ ID NO: 21878 - DNA, 20 bp, Gossypium hirsutum
cttgatttccttgtattaac

SEQ ID NO: 21879 - DNA, 20 bp, Gossypium hirsutum
cttgatttccttatattaac

SEQ ID NO: 21880 - DNA, 33 bp, Gossypium hirsutum
gctcttttattggttcctaaactacattatcac

SEQ ID NO: 21881 - DNA, 22 bp, Gossypium hirsutum
aggtgatttggctgcaagtgat

SEQ ID NO: 21882 - DNA, 15 bp, Gossypium hirsutum
tcgagacggctaaag

SEQ ID NO: 21883 - DNA, 17 bp, Gossypium hirsutum
tttcgagactgctaaag

SEQ ID NO: 21884 - DNA, 25 bp, Gossypium hirsutum
cctgaaactgagtcaccacaatcat

SEQ ID NO: 21885 - DNA, 34 bp, Gossypium hirsutum
gagtaagtttgccctttaattttaatttgttgac

SEQ ID NO: 21886 - DNA, 17 bp, Gossypium hirsutum
cccattttttcaagttc

SEQ ID NO: 21887 - DNA, 16 bp, Gossypium hirsutum
ccatttttccaagttc

SEQ ID NO: 21888 - DNA, 27 bp, Gossypium hirsutum
ggaatgaagttgggaaaataggtgtct

SEQ ID NO: 21889 - DNA, 29 bp, Gossypium hirsutum
gataaatccaacaacaacaacttcctcat

SEQ ID NO: 21890 - DNA, 17 bp, Gossypium hirsutum
catcctcagttggtgcc

SEQ ID NO: 21891 - DNA, 14 bp, Gossypium hirsutum
cctcagtgggtgcc

SEQ ID NO: 21892 - DNA, 39 bp, Gossypium hirsutum
ggaatcgtacttccaaatttacaatatcttaatttatct

SEQ ID NO: 21893 - DNA, 27 bp, Gossypium hirsutum
agaagttactaaagggcaaaagccatt

SEQ ID NO: 21894 - DNA, 17 bp, Gossypium hirsutum
tcatcaaacagaacatg

SEQ ID NO: 21895 - DNA, 17 bp, Gossypium hirsutum
tcatcaaaccgaacatg

SEQ ID NO: 21896 - DNA, 25 bp, Gossypium hirsutum
cagacagtcgggtatatctctctca

SEQ ID NO: 21897 - DNA, 32 bp, Gossypium hirsutum
cccctcattttctctttcaattttctaactct

SEQ ID NO: 21898 - DNA, 20 bp, Gossypium hirsutum
ccattataccacgtgtccta

SEQ ID NO: 21899 - DNA, 20 bp, Gossypium hirsutum
ccattataccacatgtccta

SEQ ID NO: 21900 - DNA, 27 bp, Gossypium hirsutum
ccccaaccacataattaagagatgaga

SEQ ID NO: 21901 - DNA, 32 bp, Gossypium hirsutum
gtcttgctaaatgacattcgatattaaatgct

SEQ ID NO: 21902 - DNA, 23 bp, Gossypium hirsutum
attttaacatttatacacaaaat

SEQ ID NO: 21903 - DNA, 24 bp, Gossypium hirsutum
cattttaacatttataaacaaaat

SEQ ID NO: 21904 - DNA, 25 bp, Gossypium hirsutum
cagggctcattttaatcagtttgca

SEQ ID NO: 21905 - DNA, 25 bp, Gossypium hirsutum
tcaacagcacatactgatccaactt

SEQ ID NO: 21906 - DNA, 24 bp, Gossypium hirsutum
caatagaattctagtaatgataac

SEQ ID NO: 21907 - DNA, 24 bp, Gossypium hirsutum
caatagaattctagttatgataac

SEQ ID NO: 21908 - DNA, 29 bp, Gossypium hirsutum
gtaaaattcatttggtggatagtgtgtgt

SEQ ID NO: 21909 - DNA, 25 bp, Gossypium hirsutum
cctccaacctcaccccaaaaaataa

SEQ ID NO: 21910 - DNA, 20 bp, Gossypium hirsutum
catcaattttgagatgattt

SEQ ID NO: 21911 - DNA, 20 bp, Gossypium hirsutum
catcaattttgaaatgattt

SEQ ID NO: 21912 - DNA, 25 bp, Gossypium hirsutum
catgtacgccacatcatcaaagttt

SEQ ID NO: 21913 - DNA, 25 bp, Gossypium hirsutum
gggccttttattgtgacccaagtat

SEQ ID NO: 21914 - DNA, 16 bp, Gossypium hirsutum
tcgtttccctgtttct

SEQ ID NO: 21915 - DNA, 16 bp, Gossypium hirsutum
tcgtttccctatttct

SEQ ID NO: 21916 - DNA, 24 bp, Gossypium hirsutum
caaccgttggtcattgactacaag

SEQ ID NO: 21917 - DNA, 35 bp, Gossypium hirsutum
caaactattagaccattacaagtattcttactgca

SEQ ID NO: 21918 - DNA, 18 bp, Gossypium hirsutum
ctcaatttcataatgtcc

SEQ ID NO: 21919 - DNA, 17 bp, Gossypium hirsutum
ctcaatttcaaatgtcc

SEQ ID NO: 21920 - DNA, 18 bp, Gossypium hirsutum
ccagacaagcccctgcaa

SEQ ID NO: 21921 - DNA, 29 bp, Gossypium hirsutum
ttgcatcttttatgactcctttctcatca

SEQ ID NO: 21922 - DNA, 16 bp, Gossypium hirsutum
ctgcaaaaaattcctg

SEQ ID NO: 21923 - DNA, 15 bp, Gossypium hirsutum
ctgcaaaaattcctg

SEQ ID NO: 21924 - DNA, 25 bp, Gossypium hirsutum
ggcatgagcagtgcaaaagataaat

SEQ ID NO: 21925 - DNA, 27 bp, Gossypium hirsutum
tctgtaggcatactaccaagaatgtca

SEQ ID NO: 21926 - DNA, 22 bp, Gossypium hirsutum
ctttatgattctgcttctattt

SEQ ID NO: 21927 - DNA, 18 bp, Gossypium hirsutum
atgattctgcatctattt

SEQ ID NO: 21928 - DNA, 30 bp, Gossypium hirsutum
ccttagttctaattcagaagaaacccgaat

SEQ ID NO: 21929 - DNA, 26 bp, Gossypium hirsutum
ccccaggtttctttcttttactagga

SEQ ID NO: 21930 - DNA, 23 bp, Gossypium hirsutum
taaaaacttacaaaaaaaattga

SEQ ID NO: 21931 - DNA, 20 bp, Gossypium hirsutum
aaaacttacaaaaaaattga

SEQ ID NO: 21932 - DNA, 29 bp, Gossypium hirsutum
gcctcaatttgagattcattttgtacact

SEQ ID NO: 21933 - DNA, 26 bp, Gossypium hirsutum
ggtctacgtaattgactcttcgcaaa

SEQ ID NO: 21934 - DNA, 21 bp, Gossypium hirsutum
atttaatttaagtagaaatcg

SEQ ID NO: 21935 - DNA, 21 bp, Gossypium hirsutum
atttaatttaaatagaaatcg

SEQ ID NO: 21936 - DNA, 40 bp, Gossypium hirsutum
gacaaaatttgataaatcaatttttgatgatttgactgat

SEQ ID NO: 21937 - DNA, 24 bp, Gossypium hirsutum
tcggtgaaatcgactcttctcaag

SEQ ID NO: 21938 - DNA, 18 bp, Gossypium hirsutum
aatagtgtgttgaaccat

SEQ ID NO: 21939 - DNA, 19 bp, Gossypium hirsutum
caatagtgtattgaaccat

SEQ ID NO: 21940 - DNA, 33 bp, Gossypium hirsutum
aatgtgattagaccatataatgatattgggcaa

SEQ ID NO: 21941 - DNA, 24 bp, Gossypium hirsutum
ttttagtcagctcagacacaacga

SEQ ID NO: 21942 - DNA, 23 bp, Gossypium hirsutum
aatcttgttattcctatagatct

SEQ ID NO: 21943 - DNA, 21 bp, Gossypium hirsutum
tcttgttattcctctagatct

SEQ ID NO: 21944 - DNA, 30 bp, Gossypium hirsutum
ggtcgtattcaatgctaaattgctaattca

SEQ ID NO: 21945 - DNA, 26 bp, Gossypium hirsutum
tcctccacatgatgatctcaacaaaa

SEQ ID NO: 21946 - DNA, 19 bp, Gossypium hirsutum
cttgttggctatgagtcga

SEQ ID NO: 21947 - DNA, 18 bp, Gossypium hirsutum
ttgttggctataagtcga

SEQ ID NO: 21948 - DNA, 25 bp, Gossypium hirsutum
gcttgaaaggcatcagatggaatac

SEQ ID NO: 21949 - DNA, 42 bp, Gossypium hirsutum
gttgggtcatcattttataatttttcatagttagattatcat

SEQ ID NO: 21950 - DNA, 24 bp, Gossypium hirsutum
caactattagtaaataacaattat

SEQ ID NO: 21951 - DNA, 24 bp, Gossypium hirsutum
caactattagtaaataacaactat

SEQ ID NO: 21952 - DNA, 49 bp, Gossypium hirsutum
gaatctaaattccactaatcattaataaaattcaactaatttagtgtaa

SEQ ID NO: 21953 - DNA, 34 bp, Gossypium hirsutum
gaaaaacacaaacttgaactactatagaaacaga

SEQ ID NO: 21954 - DNA, 13 bp, Gossypium hirsutum
ctgccgtgctctc

SEQ ID NO: 21955 - DNA, 14 bp, Gossypium hirsutum
tctgccatgctctc

SEQ ID NO: 21956 - DNA, 27 bp, Gossypium hirsutum
cccaattttcattcagaaatggagcat

SEQ ID NO: 21957 - DNA, 22 bp, Gossypium hirsutum
ggtaggctgtcaggttaacagt

SEQ ID NO: 21958 - DNA, 21 bp, Gossypium hirsutum
aaatacacgttgttttatagc

SEQ ID NO: 21959 - DNA, 19 bp, Gossypium hirsutum
atacacgttgttatatagc

SEQ ID NO: 21960 - DNA, 29 bp, Gossypium hirsutum
caccacatcattcaaaatttgatcacctt

SEQ ID NO: 21961 - DNA, 24 bp, Gossypium hirsutum
gcctgagcccaattcaataatggt

SEQ ID NO: 21962 - DNA, 15 bp, Gossypium hirsutum
cctttggaacttggc

SEQ ID NO: 21963 - DNA, 14 bp, Gossypium hirsutum
ctttgggacttggc

SEQ ID NO: 21964 - DNA, 21 bp, Gossypium hirsutum
cggcccaactgaggctaatat

SEQ ID NO: 21965 - DNA, 25 bp, Gossypium hirsutum
agacggaaaatggtaagatggcaat

SEQ ID NO: 21966 - DNA, 21 bp, Gossypium hirsutum
catctttaagttcataatatg

SEQ ID NO: 21967 - DNA, 22 bp, Gossypium hirsutum
acatctttaagtttataatatg

SEQ ID NO: 21968 - DNA, 23 bp, Gossypium hirsutum
gggtctgcatcactcgattagag

SEQ ID NO: 21969 - DNA, 29 bp, Gossypium hirsutum
tctccaatccagaaagacaaaaattacct

SEQ ID NO: 21970 - DNA, 22 bp, Gossypium hirsutum
attctctaataagacgtccatc

SEQ ID NO: 21971 - DNA, 23 bp, Gossypium hirsutum
aattctctaataagatgtccatc

SEQ ID NO: 21972 - DNA, 24 bp, Gossypium hirsutum
gctcaccaagcttcaaacgttatc

SEQ ID NO: 21973 - DNA, 31 bp, Gossypium hirsutum
gtatcattatcagtgctattgggttagatgt

SEQ ID NO: 21974 - DNA, 19 bp, Gossypium hirsutum
aattgaaaaaaaaatctcc

SEQ ID NO: 21975 - DNA, 17 bp, Gossypium hirsutum
attgaaaaaaaatctcc

SEQ ID NO: 21976 - DNA, 25 bp, Gossypium hirsutum
ccacaaactccaaccatatctaacg

SEQ ID NO: 21977 - DNA, 28 bp, Gossypium hirsutum
gctcgtatgtaatgtactatcccctact

SEQ ID NO: 21978 - DNA, 20 bp, Gossypium hirsutum
ctaatgttgaaataaaaaat

SEQ ID NO: 21979 - DNA, 19 bp, Gossypium hirsutum
ctaatgttgaaataaaaat

SEQ ID NO: 21980 - DNA, 24 bp, Gossypium hirsutum
caggaaatcttgcacgaagttctt

SEQ ID NO: 21981 - DNA, 27 bp, Gossypium hirsutum
cccttactaacatcgtaacatggaact

SEQ ID NO: 21982 - DNA, 23 bp, Gossypium hirsutum
tcagagattctaactatcaatat

SEQ ID NO: 21983 - DNA, 22 bp, Gossypium hirsutum
cagagattctaactaccaatat

SEQ ID NO: 21984 - DNA, 33 bp, Gossypium hirsutum
aattctgcaaagttaatcctcatatcaatacct

SEQ ID NO: 21985 - DNA, 28 bp, Gossypium hirsutum
cgagagcccaagaatattattagttcca

SEQ ID NO: 21986 - DNA, 19 bp, Gossypium hirsutum
caagatctcgctattataa

SEQ ID NO: 21987 - DNA, 18 bp, Gossypium hirsutum
aagatctcgctataataa

SEQ ID NO: 21988 - DNA, 41 bp, Gossypium hirsutum
tttttacttttaatcgcaaccgttaattttaaaaatatctc

SEQ ID NO: 21989 - DNA, 25 bp, Gossypium hirsutum
aaagggtcaaacgaaggttaaagga

SEQ ID NO: 21990 - DNA, 17 bp, Gossypium hirsutum
tgaggttcgtcattaca

SEQ ID NO: 21991 - DNA, 17 bp, Gossypium hirsutum
tgaggttcgtcatgaca

SEQ ID NO: 21992 - DNA, 24 bp, Gossypium hirsutum
tcgcatgaaatcgagaaaggagat

SEQ ID NO: 21993 - DNA, 23 bp, Gossypium hirsutum
cccccaaattgtacgacttgttg

SEQ ID NO: 21994 - DNA, 20 bp, Gossypium hirsutum
tttgtttgattagtaaaatt

SEQ ID NO: 21995 - DNA, 16 bp, Gossypium hirsutum
tttgattcgtaaaatt

SEQ ID NO: 21996 - DNA, 26 bp, Gossypium hirsutum
acaaactaataatgccctctcaagct

SEQ ID NO: 21997 - DNA, 29 bp, Gossypium hirsutum
tgggagacaacccaaatttattctcattt

SEQ ID NO: 21998 - DNA, 18 bp, Gossypium hirsutum
aacctccattacgttcct

SEQ ID NO: 21999 - DNA, 16 bp, Gossypium hirsutum
cctccattacattcct

SEQ ID NO: 22000 - DNA, 25 bp, Gossypium hirsutum
gccaccatcattattcgacttttga

SEQ ID NO: 22001 - DNA, 32 bp, Gossypium hirsutum
tcttgttgtcactaataaagcttttacagaga

SEQ ID NO: 22002 - DNA, 19 bp, Gossypium hirsutum
aactttcagctaattctaa

SEQ ID NO: 22003 - DNA, 19 bp, Gossypium hirsutum
aactttcagctacttctaa

SEQ ID NO: 22004 - DNA, 26 bp, Gossypium hirsutum
gagaaatggaaatggaagccaagaag

SEQ ID NO: 22005 - DNA, 25 bp, Gossypium hirsutum
cgatcagcaaaccaactagcaaata

SEQ ID NO: 22006 - DNA, 13 bp, Gossypium hirsutum
cagcccggtgggc

SEQ ID NO: 22007 - DNA, 13 bp, Gossypium hirsutum
cagcccagtgggc

SEQ ID NO: 22008 - DNA, 25 bp, Gossypium hirsutum
tggctcaccctaatgagaattttcc

SEQ ID NO: 22009 - DNA, 35 bp, Gossypium hirsutum
tggcccgtgaatgtatataaaattttcaatatagt

SEQ ID NO: 22010 - DNA, 23 bp, Gossypium hirsutum
cacttttatattggaacttatat

SEQ ID NO: 22011 - DNA, 22 bp, Gossypium hirsutum
acttttatattggaaattatat

SEQ ID NO: 22012 - DNA, 42 bp, Gossypium hirsutum
tctctaaaagtttatcaaaatttcaatatagtctatccactt

SEQ ID NO: 22013 - DNA, 20 bp, Gossypium hirsutum
ccaagcagccaagttttgca

SEQ ID NO: 22014 - DNA, 15 bp, Gossypium hirsutum
atgtgggagggtacc

SEQ ID NO: 22015 - DNA, 16 bp, Gossypium hirsutum
catgtgagagggtacc

SEQ ID NO: 22016 - DNA, 27 bp, Gossypium hirsutum
aggcatgaagtttattacgactccatt

SEQ ID NO: 22017 - DNA, 25 bp, Gossypium hirsutum
gtatggtgcaagtcagaatgtatgg

SEQ ID NO: 22018 - DNA, 14 bp, Gossypium hirsutum
cacggtcgccaaac

SEQ ID NO: 22019 - DNA, 14 bp, Gossypium hirsutum
cacggtcaccaaac

SEQ ID NO: 22020 - DNA, 21 bp, Gossypium hirsutum
ttgaacaggctgtgtgactca

SEQ ID NO: 22021 - DNA, 29 bp, Gossypium hirsutum
ttgctcaaaatatctcatccatcccttaa

SEQ ID NO: 22022 - DNA, 22 bp, Gossypium hirsutum
taaatttatccacacctttaat

SEQ ID NO: 22023 - DNA, 19 bp, Gossypium hirsutum
atttatccacacatttaat

SEQ ID NO: 22024 - DNA, 35 bp, Gossypium hirsutum
cttccttctttcacatacttcctctaaaaagtatt

SEQ ID NO: 22025 - DNA, 40 bp, Gossypium hirsutum
catttgtatcttaaatggataaaataaatgtgtaacacca

SEQ ID NO: 22026 - DNA, 21 bp, Gossypium hirsutum
cttcctttgagatatcagtca

SEQ ID NO: 22027 - DNA, 19 bp, Gossypium hirsutum
tcctttgagatagcagtca

SEQ ID NO: 22028 - DNA, 30 bp, Gossypium hirsutum
agtcgctggtagttcaaacaattattatct

SEQ ID NO: 22029 - DNA, 36 bp, Gossypium hirsutum
agtataaagaagcaattaaagtatcaccagagaaaa

SEQ ID NO: 22030 - DNA, 22 bp, Gossypium hirsutum
tcaatcataaatacaagctaac

SEQ ID NO: 22031 - DNA, 23 bp, Gossypium hirsutum
atcaatcataaatactagctaac

SEQ ID NO: 22032 - DNA, 21 bp, Gossypium hirsutum
gctcttcccacgaggtgatat

SEQ ID NO: 22033 - DNA, 35 bp, Gossypium hirsutum
gatttatgagaatttttagcactcgtaattgaaga

SEQ ID NO: 22034 - DNA, 18 bp, Gossypium hirsutum
caagaattaagaaaagca

SEQ ID NO: 22035 - DNA, 18 bp, Gossypium hirsutum
caagaattaagcaaagca

SEQ ID NO: 22036 - DNA, 33 bp, Gossypium hirsutum
aaatcagttcctcaaataaaatctcctatcaca

SEQ ID NO: 22037 - DNA, 23 bp, Gossypium hirsutum
gggctttctccagcagatagatt

SEQ ID NO: 22038 - DNA, 16 bp, Gossypium hirsutum
caattacgggtttttc

SEQ ID NO: 22039 - DNA, 15 bp, Gossypium hirsutum
aattacggctttttc

SEQ ID NO: 22040 - DNA, 25 bp, Gossypium hirsutum
cccgattcgccactcttagttattt

SEQ ID NO: 22041 - DNA, 22 bp, Gossypium hirsutum
catttcaacgcacttgaaccca

SEQ ID NO: 22042 - DNA, 21 bp, Gossypium hirsutum
ttctcttacactagtaacaat

SEQ ID NO: 22043 - DNA, 17 bp, Gossypium hirsutum
cttacactggtaacaat

SEQ ID NO: 22044 - DNA, 24 bp, Gossypium hirsutum
agtcttagctcgattggcattgat

SEQ ID NO: 22045 - DNA, 32 bp, Gossypium hirsutum
agactcctatcagagaattcaaaacaaaagaa

SEQ ID NO: 22046 - DNA, 18 bp, Gossypium hirsutum
tcattcatccaataatac

SEQ ID NO: 22047 - DNA, 19 bp, Gossypium hirsutum
atcattcatcaaataatac

SEQ ID NO: 22048 - DNA, 27 bp, Gossypium hirsutum
acttgcatattttgcatgaaccagttt

SEQ ID NO: 22049 - DNA, 33 bp, Gossypium hirsutum
gccttcatcttattacaatcaaatacagaggtt

SEQ ID NO: 22050 - DNA, 20 bp, Gossypium hirsutum
tcttcggtacctataccgta

SEQ ID NO: 22051 - DNA, 18 bp, Gossypium hirsutum
ttcggtacctagaccgta

SEQ ID NO: 22052 - DNA, 25 bp, Gossypium hirsutum
tccttgttaactggtagtgcctttt

SEQ ID NO: 22053 - DNA, 25 bp, Gossypium hirsutum
actcccatggtttaagattgccttt

SEQ ID NO: 22054 - DNA, 15 bp, Gossypium hirsutum
ttctgggtttaaccc

SEQ ID NO: 22055 - DNA, 14 bp, Gossypium hirsutum
tctgggtgtaaccc

SEQ ID NO: 22056 - DNA, 22 bp, Gossypium hirsutum
cggtcctactctaagtgttgca

SEQ ID NO: 22057 - DNA, 29 bp, Gossypium hirsutum
cagccgtcgttgatgtctaataaaaaatt

SEQ ID NO: 22058 - DNA, 23 bp, Gossypium hirsutum
acacatatttatgttttaaatac

SEQ ID NO: 22059 - DNA, 21 bp, Gossypium hirsutum
acatatttatgttctaaatac

SEQ ID NO: 22060 - DNA, 39 bp, Gossypium hirsutum
gagtcaatcgaatactatttcaattaaggaattacaaaa

SEQ ID NO: 22061 - DNA, 27 bp, Gossypium hirsutum
ctttacaccaaactctaatctgccaga

SEQ ID NO: 22062 - DNA, 18 bp, Gossypium hirsutum
ctatgtcaaacaaataat

SEQ ID NO: 22063 - DNA, 18 bp, Gossypium hirsutum
ctatgtcaaagaaataat

SEQ ID NO: 22064 - DNA, 25 bp, Gossypium hirsutum
cgagaagaagacatgtagagtggaa

SEQ ID NO: 22065 - DNA, 24 bp, Gossypium hirsutum
gcatccagaagtaggtccatgaaa

SEQ ID NO: 22066 - DNA, 16 bp, Gossypium hirsutum
accctagttggcaacc

SEQ ID NO: 22067 - DNA, 17 bp, Gossypium hirsutum
aaccctagtttgcaacc

SEQ ID NO: 22068 - DNA, 26 bp, Gossypium hirsutum
tgagattccgatgttgacttttctgt

SEQ ID NO: 22069 - DNA, 25 bp, Gossypium hirsutum
gcgactccaaccacaaagtattcat

SEQ ID NO: 22070 - DNA, 16 bp, Gossypium hirsutum
ctcacccctagtttca

SEQ ID NO: 22071 - DNA, 13 bp, Gossypium hirsutum
acccctaatttca

SEQ ID NO: 22072 - DNA, 24 bp, Gossypium hirsutum
tcgattcgaattccatctcactcg

SEQ ID NO: 22073 - DNA, 25 bp, Gossypium hirsutum
agcagatggaaaatgaaccacacta

SEQ ID NO: 22074 - DNA, 16 bp, Gossypium hirsutum
ctgcctcatattctca

SEQ ID NO: 22075 - DNA, 15 bp, Gossypium hirsutum
tgcctcatgttctca

SEQ ID NO: 22076 - DNA, 25 bp, Gossypium hirsutum
cgatttgtgctgttgtttgtaggaa

SEQ ID NO: 22077 - DNA, 24 bp, Gossypium hirsutum
tgctcgtgtctctgtgtaaatctg

SEQ ID NO: 22078 - DNA, 19 bp, Gossypium hirsutum
ttgaagcatttacattgca

SEQ ID NO: 22079 - DNA, 16 bp, Gossypium hirsutum
aagcatttgcattgca

SEQ ID NO: 22080 - DNA, 34 bp, Gossypium hirsutum
gtttacaaaattacaacagtagaaaagcaccata

SEQ ID NO: 22081 - DNA, 32 bp, Gossypium hirsutum
cataatcaaaatgtactcatctaggaccacaa

SEQ ID NO: 22082 - DNA, 20 bp, Gossypium hirsutum
ccttcaatatacaaataaca

SEQ ID NO: 22083 - DNA, 20 bp, Gossypium hirsutum
ccttcaatatacaaatgaca

SEQ ID NO: 22084 - DNA, 29 bp, Gossypium hirsutum
ccagatctcaacgattttccttttgaatt

SEQ ID NO: 22085 - DNA, 28 bp, Gossypium hirsutum
gtgtcactcatgctacgtattagtttca

SEQ ID NO: 22086 - DNA, 23 bp, Gossypium hirsutum
atacttataagtttaaaaaaaag

SEQ ID NO: 22087 - DNA, 20 bp, Gossypium hirsutum
acttataagtttaaaaaaag

SEQ ID NO: 22088 - DNA, 49 bp, Gossypium hirsutum
ctccaaattttagtaatggatcataattgtaaaatttaattttactatg

SEQ ID NO: 22089 - DNA, 29 bp, Gossypium hirsutum
gatacatcattctcgacccaatttaccta

SEQ ID NO: 22090 - DNA, 18 bp, Gossypium hirsutum
ttgactcataggaattaa

SEQ ID NO: 22091 - DNA, 20 bp, Gossypium hirsutum
atttgactcataggtattaa

SEQ ID NO: 22092 - DNA, 25 bp, Gossypium hirsutum
tccgacgggtgagttgaaaatttaa

SEQ ID NO: 22093 - DNA, 22 bp, Gossypium hirsutum
ccctacatcacaaccacgtgtt

SEQ ID NO: 22094 - DNA, 18 bp, Gossypium hirsutum
ttcatccatcccctttaa

SEQ ID NO: 22095 - DNA, 19 bp, Gossypium hirsutum
cttcatccattccctttaa

SEQ ID NO: 22096 - DNA, 25 bp, Gossypium hirsutum
cccatgatcaccttactcccaaaat

SEQ ID NO: 22097 - DNA, 35 bp, Gossypium hirsutum
tcggcattgtattagcttatacctttatagttttt

SEQ ID NO: 22098 - DNA, 24 bp, Gossypium hirsutum
cataagatttaaaaaaaaattaag

SEQ ID NO: 22099 - DNA, 22 bp, Gossypium hirsutum
ataagatttaaaaaaaattaag

SEQ ID NO: 22100 - DNA, 26 bp, Gossypium hirsutum
cacagatgtaggaaaagactctggtt

SEQ ID NO: 22101 - DNA, 23 bp, Gossypium hirsutum
tggtttgggttgtttggttttgg

SEQ ID NO: 22102 - DNA, 20 bp, Gossypium hirsutum
aatttgtgtcttccagcggt

SEQ ID NO: 22103 - DNA, 17 bp, Gossypium hirsutum
ttgtgtcttccggcggt

SEQ ID NO: 22104 - DNA, 22 bp, Gossypium hirsutum
agggtttggagctcttgaagtc

SEQ ID NO: 22105 - DNA, 25 bp, Gossypium hirsutum
agtttgtcaacgatactgcaacaga

SEQ ID NO: 22106 - DNA, 18 bp, Gossypium hirsutum
ctttagtgatgtggattc

SEQ ID NO: 22107 - DNA, 19 bp, Gossypium hirsutum
tctttagtgatctggattc

SEQ ID NO: 22108 - DNA, 25 bp, Gossypium hirsutum
gagagctatctctattgggacctca

SEQ ID NO: 22109 - DNA, 26 bp, Gossypium hirsutum
ctagagacatacaagctagggtcagt

SEQ ID NO: 22110 - DNA, 20 bp, Gossypium hirsutum
atagtagttcaaaagttccg

SEQ ID NO: 22111 - DNA, 16 bp, Gossypium hirsutum
tagttcgaaagttccg

SEQ ID NO: 22112 - DNA, 25 bp, Gossypium hirsutum
gatcatcaccctggaaagagaaaga

SEQ ID NO: 22113 - DNA, 26 bp, Gossypium hirsutum
cgagaactttatttttcccccgatct

SEQ ID NO: 22114 - DNA, 19 bp, Gossypium hirsutum
ctcattaatacaattttac

SEQ ID NO: 22115 - DNA, 17 bp, Gossypium hirsutum
cattaatgcaattttac

SEQ ID NO: 22116 - DNA, 33 bp, Gossypium hirsutum
ggactaaattgtaaaagttgtgaaacattaggg

SEQ ID NO: 22117 - DNA, 29 bp, Gossypium hirsutum
tgattgaaatgttggcaccttttactttt

SEQ ID NO: 22118 - DNA, 16 bp, Gossypium hirsutum
tgtgaccatgcaaaat

SEQ ID NO: 22119 - DNA, 17 bp, Gossypium hirsutum
atgtgaccatccaaaat

SEQ ID NO: 22120 - DNA, 24 bp, Gossypium hirsutum
ggattgattatgctgctgtttggt

SEQ ID NO: 22121 - DNA, 29 bp, Gossypium hirsutum
ttcacttgtttattgtctgcttttttggt

SEQ ID NO: 22122 - DNA, 18 bp, Gossypium hirsutum
aagtggtgaagtgaatat

SEQ ID NO: 22123 - DNA, 18 bp, Gossypium hirsutum
aagtggtgaaatgaatat

SEQ ID NO: 22124 - DNA, 30 bp, Gossypium hirsutum
tctgccatagtttgaaaatatcattctcca

SEQ ID NO: 22125 - DNA, 31 bp, Gossypium hirsutum
acaaaactgagccataaaatttcatccaaat

SEQ ID NO: 22126 - DNA, 14 bp, Gossypium hirsutum
cacgaggcataaaa

SEQ ID NO: 22127 - DNA, 14 bp, Gossypium hirsutum
cacgaggcctaaaa

SEQ ID NO: 22128 - DNA, 22 bp, Gossypium hirsutum
cccaaaccgctttcgatgtatg

SEQ ID NO: 22129 - DNA, 38 bp, Gossypium hirsutum
ttcttgaatgattaatgttatggagaaagtatggataa

SEQ ID NO: 22130 - DNA, 19 bp, Gossypium hirsutum
cccaagaatttcgatcata

SEQ ID NO: 22131 - DNA, 18 bp, Gossypium hirsutum
ccaagaatttcaatcata

SEQ ID NO: 22132 - DNA, 32 bp, Gossypium hirsutum
ggaacaatatctaaaggaaattcatacaccca

SEQ ID NO: 22133 - DNA, 30 bp, Gossypium hirsutum
aacaacaccattgttcatatcaacaagatc

SEQ ID NO: 22134 - DNA, 13 bp, Gossypium hirsutum
ccgccgaggccta

SEQ ID NO: 22135 - DNA, 13 bp, Gossypium hirsutum
ccgccaaggccta

SEQ ID NO: 22136 - DNA, 22 bp, Gossypium hirsutum
ctgaatggcgctgtggaagata

SEQ ID NO: 22137 - DNA, 25 bp, Gossypium hirsutum
ccatttcgatggaacaaatgctctt

SEQ ID NO: 22138 - DNA, 20 bp, Gossypium hirsutum
tccattaatgttaggaaaat

SEQ ID NO: 22139 - DNA, 18 bp, Gossypium hirsutum
cattaatgttgggaaaat

SEQ ID NO: 22140 - DNA, 31 bp, Gossypium hirsutum
ttttagcacagtcataaatctccttgagaat

SEQ ID NO: 22141 - DNA, 30 bp, Gossypium hirsutum
gtggtttaaccaattattcgttttgtgttt

SEQ ID NO: 22142 - DNA, 19 bp, Gossypium hirsutum
atattctggcataatctta

SEQ ID NO: 22143 - DNA, 16 bp, Gossypium hirsutum
ttctggcatcatctta

SEQ ID NO: 22144 - DNA, 30 bp, Gossypium hirsutum
agatacaaattcggtttaattcgtcttgga

SEQ ID NO: 22145 - DNA, 23 bp, Gossypium hirsutum
gggtgttttcaggccatatgaga

SEQ ID NO: 22146 - DNA, 15 bp, Gossypium hirsutum
tcataagggaatttc

SEQ ID NO: 22147 - DNA, 18 bp, Gossypium hirsutum
ttattcataaggaatttc

SEQ ID NO: 22148 - DNA, 31 bp, Gossypium hirsutum
aaataataatggtccaatacgaattttgggc

SEQ ID NO: 22149 - DNA, 33 bp, Gossypium hirsutum
gacagaatatggaaaccttatatggaaagtagt

SEQ ID NO: 22150 - DNA, 22 bp, Gossypium hirsutum
ccactgtatttttttttcttca

SEQ ID NO: 22151 - DNA, 20 bp, Gossypium hirsutum
cactgtattttttttcttca

SEQ ID NO: 22152 - DNA, 30 bp, Gossypium hirsutum
catattaaatcttgcaaaaacgagccctta

SEQ ID NO: 22153 - DNA, 33 bp, Gossypium hirsutum
ggtcggttaaccaaattttatatgtttttgtct

SEQ ID NO: 22154 - DNA, 19 bp, Gossypium hirsutum
ctgataaccgaattttcaa

SEQ ID NO: 22155 - DNA, 19 bp, Gossypium hirsutum
ctgataaccgatttttcaa

SEQ ID NO: 22156 - DNA, 24 bp, Gossypium hirsutum
gttggtggccgaatttagttcaat

SEQ ID NO: 22157 - DNA, 24 bp, Gossypium hirsutum
acagaataaagccagggtagaagc

SEQ ID NO: 22158 - DNA, 16 bp, Gossypium hirsutum
tgagatcgtgaaggtg

SEQ ID NO: 22159 - DNA, 16 bp, Gossypium hirsutum
tgagatcgtggaggtg

SEQ ID NO: 22160 - DNA, 26 bp, Gossypium hirsutum
atggagtcgacatatcacctaatcct

SEQ ID NO: 22161 - DNA, 34 bp, Gossypium hirsutum
tgagttaagaagtcctcaaattgtcaattagatt

SEQ ID NO: 22162 - DNA, 24 bp, Gossypium hirsutum
aaattgacatttaacatttaaaat

SEQ ID NO: 22163 - DNA, 22 bp, Gossypium hirsutum
attgacatttaacatctaaaat

SEQ ID NO: 22164 - DNA, 26 bp, Gossypium hirsutum
gacttaatcggccaaagtgtgtattt

SEQ ID NO: 22165 - DNA, 25 bp, Gossypium hirsutum
gtggagctgttgaatctgggattta

SEQ ID NO: 22166 - DNA, 17 bp, Gossypium hirsutum
ttggtcatagcaactgt

SEQ ID NO: 22167 - DNA, 19 bp, Gossypium hirsutum
aattggtcatatcaactgt

SEQ ID NO: 22168 - DNA, 30 bp, Gossypium hirsutum
gggtacaactgttaaagcaatcaatagaag

SEQ ID NO: 22169 - DNA, 31 bp, Gossypium hirsutum
ctccaattcgattacatctagttatctgcaa

SEQ ID NO: 22170 - DNA, 22 bp, Gossypium hirsutum
ttctgactttatcaagtattat

SEQ ID NO: 22171 - DNA, 22 bp, Gossypium hirsutum
ttctgactttatgaagtattat

SEQ ID NO: 22172 - DNA, 25 bp, Gossypium hirsutum
caggatatcaaatccgagggatgaa

SEQ ID NO: 22173 - DNA, 25 bp, Gossypium hirsutum
agagcggattttacagcatgcatat

SEQ ID NO: 22174 - DNA, 18 bp, Gossypium hirsutum
caaatacatctgaaaatt

SEQ ID NO: 22175 - DNA, 17 bp, Gossypium hirsutum
aaatacatcagaaaatt

SEQ ID NO: 22176 - DNA, 24 bp, Gossypium hirsutum
cacattccttccttgtccaacaga

SEQ ID NO: 22177 - DNA, 44 bp, Gossypium hirsutum
ccggatcaaaatattaatttttttttgtaatatttgattgtctt

SEQ ID NO: 22178 - DNA, 23 bp, Gossypium hirsutum
cctctatatagaaacagttagac

SEQ ID NO: 22179 - DNA, 22 bp, Gossypium hirsutum
ctctatatagaaacggttagac

SEQ ID NO: 22180 - DNA, 25 bp, Gossypium hirsutum
gacagcttcagtctgatctgagaat

SEQ ID NO: 22181 - DNA, 29 bp, Gossypium hirsutum
ttccaaatactatggcagaagaaacatct

SEQ ID NO: 22182 - DNA, 18 bp, Gossypium hirsutum
ttcttctccaaatctggt

SEQ ID NO: 22183 - DNA, 18 bp, Gossypium hirsutum
ttcttctccaactctggt

SEQ ID NO: 22184 - DNA, 24 bp, Gossypium hirsutum
tcagagtcaaagaaaccacagctt

SEQ ID NO: 22185 - DNA, 41 bp, Gossypium hirsutum
aagaagaagaatgaacaaatgaaataaaagagataagaaaa

SEQ ID NO: 22186 - DNA, 21 bp, Gossypium hirsutum
aataaatgaaaaagaaaaaaa

SEQ ID NO: 22187 - DNA, 24 bp, Gossypium hirsutum
ataaataaatgaaaaataaaaaaa

SEQ ID NO: 22188 - DNA, 21 bp, Gossypium hirsutum
aaacccgagcctaacatcgtt

SEQ ID NO: 22189 - DNA, 42 bp, Gossypium hirsutum
tgaaagaaattttcatttaactcaaagactagaagaaattaa

SEQ ID NO: 22190 - DNA, 19 bp, Gossypium hirsutum
atacaaacttcgacccttt

SEQ ID NO: 22191 - DNA, 19 bp, Gossypium hirsutum
atacaaacttcaacccttt

SEQ ID NO: 22192 - DNA, 36 bp, Gossypium hirsutum
atgaaaatcgtatatttatgggactagtttggatag

SEQ ID NO: 22193 - DNA, 27 bp, Gossypium hirsutum
aggcttgcactcattttgaatgaattt

SEQ ID NO: 22194 - DNA, 16 bp, Gossypium hirsutum
ttgttgtccaagttca

SEQ ID NO: 22195 - DNA, 17 bp, Gossypium hirsutum
attgttgtccaggttca

SEQ ID NO: 22196 - DNA, 23 bp, Gossypium hirsutum
caaagggtgctgacatgacaatt

SEQ ID NO: 22197 - DNA, 29 bp, Gossypium hirsutum
gtacctttttcttttctttcttctgtgca

SEQ ID NO: 22198 - DNA, 18 bp, Gossypium hirsutum
aagcaaaagtctgactcc

SEQ ID NO: 22199 - DNA, 20 bp, Gossypium hirsutum
aaaagcaaaaatctgactcc

SEQ ID NO: 22200 - DNA, 25 bp, Gossypium hirsutum
acaaggatgttggtctcagcaataa

SEQ ID NO: 22201 - DNA, 25 bp, Gossypium hirsutum
tctattacccttagcaagaccgcta

SEQ ID NO: 22202 - DNA, 25 bp, Gossypium hirsutum
ttatttttgtttaatttgttttcac

SEQ ID NO: 22203 - DNA, 25 bp, Gossypium hirsutum
ttatttttgtttaatttattttcac

SEQ ID NO: 22204 - DNA, 26 bp, Gossypium hirsutum
gagctgtctatataaagggctgtgtt

SEQ ID NO: 22205 - DNA, 30 bp, Gossypium hirsutum
gggttcacagactaaattcacttactatca

SEQ ID NO: 22206 - DNA, 15 bp, Gossypium hirsutum
cagttaggcaactgc

SEQ ID NO: 22207 - DNA, 15 bp, Gossypium hirsutum
cagttagccaactgc

SEQ ID NO: 22208 - DNA, 30 bp, Gossypium hirsutum
caagatatgatttttaaggtgacagtgacg

SEQ ID NO: 22209 - DNA, 23 bp, Gossypium hirsutum
ccattaaccaaagaggaggcgaa

SEQ ID NO: 22210 - DNA, 15 bp, Gossypium hirsutum
aaccggtcagtcaac

SEQ ID NO: 22211 - DNA, 13 bp, Gossypium hirsutum
ccggtgagtcaac

SEQ ID NO: 22212 - DNA, 22 bp, Gossypium hirsutum
cgcaccatgtctgacctacttt

SEQ ID NO: 22213 - DNA, 21 bp, Gossypium hirsutum
tccctgggccagtatgtaaca

SEQ ID NO: 22214 - DNA, 18 bp, Gossypium hirsutum
aagtttgtttggcaaaat

SEQ ID NO: 22215 - DNA, 15 bp, Gossypium hirsutum
tttgtttggaaaaat

SEQ ID NO: 22216 - DNA, 23 bp, Gossypium hirsutum
acagcacaagaggaaatgcactt

SEQ ID NO: 22217 - DNA, 22 bp, Gossypium hirsutum
ggatgaatgggtcgaggctttt

SEQ ID NO: 22218 - DNA, 17 bp, Gossypium hirsutum
catatggacgctgattt

SEQ ID NO: 22219 - DNA, 18 bp, Gossypium hirsutum
ccatatggacactgattt

SEQ ID NO: 22220 - DNA, 24 bp, Gossypium hirsutum
cgagagctttgcttttctccaaaa

SEQ ID NO: 22221 - DNA, 35 bp, Gossypium hirsutum
accaagaagattttgtatcactttgaataatctca

SEQ ID NO: 22222 - DNA, 22 bp, Gossypium hirsutum
ttaatgcaggaaaatgtagatt

SEQ ID NO: 22223 - DNA, 19 bp, Gossypium hirsutum
atgcaggaaaatatagatt

SEQ ID NO: 22224 - DNA, 33 bp, Gossypium hirsutum
gttgatcttaaggtccatataggatccttatct

SEQ ID NO: 22225 - DNA, 30 bp, Gossypium hirsutum
aggaaatggtttctacaatcttaagtcgtt

SEQ ID NO: 22226 - DNA, 19 bp, Gossypium hirsutum
aatttgatcagacatcgct

SEQ ID NO: 22227 - DNA, 16 bp, Gossypium hirsutum
ttgatcagaaatcgct

SEQ ID NO: 22228 - DNA, 21 bp, Gossypium hirsutum
cggtaaccaaattggctgctt

SEQ ID NO: 22229 - DNA, 24 bp, Gossypium hirsutum
tttaggagtctttcgcctgttagg

SEQ ID NO: 22230 - DNA, 17 bp, Gossypium hirsutum
aaccaaaccgtgaggac

SEQ ID NO: 22231 - DNA, 17 bp, Gossypium hirsutum
aaccaaaccatgaggac

SEQ ID NO: 22232 - DNA, 21 bp, Gossypium hirsutum
acgagaagaacgccaatcgaa

SEQ ID NO: 22233 - DNA, 39 bp, Gossypium hirsutum
gcatttcgatatttgtggatatttgatttattttattcg

SEQ ID NO: 22234 - DNA, 19 bp, Gossypium hirsutum
caagtggttatagataaat

SEQ ID NO: 22235 - DNA, 19 bp, Gossypium hirsutum
caagtggttataaataaat

SEQ ID NO: 22236 - DNA, 30 bp, Gossypium hirsutum
tggaattaagtgtgtagttacgtttttcct

SEQ ID NO: 22237 - DNA, 28 bp, Gossypium hirsutum
gaatttggtgagaaagtggaagatgttg

SEQ ID NO: 22238 - DNA, 20 bp, Gossypium hirsutum
agaagcatggaatattagta

SEQ ID NO: 22239 - DNA, 20 bp, Gossypium hirsutum
agaagcatggaatcttagta

SEQ ID NO: 22240 - DNA, 45 bp, Gossypium hirsutum
gtattttttttaaagagtgtaatgtctatgaagaattgttagtta

SEQ ID NO: 22241 - DNA, 44 bp, Gossypium hirsutum
cctttgttttctcccaaaatttttagtatttatatttggtatat

SEQ ID NO: 22242 - DNA, 24 bp, Gossypium hirsutum
tttttaaaactttaatccaaatat

SEQ ID NO: 22243 - DNA, 25 bp, Gossypium hirsutum
ctttttaaaactttaatctaaatat

SEQ ID NO: 22244 - DNA, 49 bp, Gossypium hirsutum
catttgtattattagatattaacataacatagaaaacataaacctaaca

SEQ ID NO: 22245 - DNA, 43 bp, Gossypium hirsutum
attgttactaattaagaaaattcactcatttacatcatgtaag

SEQ ID NO: 22246 - DNA, 20 bp, Gossypium hirsutum
tcgaacctaaaaccttaaaa

SEQ ID NO: 22247 - DNA, 20 bp, Gossypium hirsutum
tcgaacctaaaactttaaaa

SEQ ID NO: 22248 - DNA, 27 bp, Gossypium hirsutum
agcttaatagcaaagttgaggccataa

SEQ ID NO: 22249 - DNA, 30 bp, Gossypium hirsutum
agtggtcttaaaatgagttcagattaacca

SEQ ID NO: 22250 - DNA, 20 bp, Gossypium hirsutum
cacaaatataagtaaatttg

SEQ ID NO: 22251 - DNA, 19 bp, Gossypium hirsutum
acaaatataagtgaatttg

SEQ ID NO: 22252 - DNA, 24 bp, Gossypium hirsutum
gcttgtttaagtttggcctcaact

SEQ ID NO: 22253 - DNA, 25 bp, Gossypium hirsutum
caagtgaactcgaagggattaccat

SEQ ID NO: 22254 - DNA, 20 bp, Gossypium hirsutum
actgaccaatattttgcgcc

SEQ ID NO: 22255 - DNA, 19 bp, Gossypium hirsutum
ctgaccaatatttcgcgcc

SEQ ID NO: 22256 - DNA, 24 bp, Gossypium hirsutum
caaattcacttcatcccggaggaa

SEQ ID NO: 22257 - DNA, 25 bp, Gossypium hirsutum
gctctcatgcatcacttccatatgt

SEQ ID NO: 22258 - DNA, 21 bp, Gossypium hirsutum
caaaccagatccttttggcga

SEQ ID NO: 22259 - DNA, 21 bp, Gossypium hirsutum
caaaccagatccttttggtga

SEQ ID NO: 22260 - DNA, 34 bp, Gossypium hirsutum
ttgattgcaatgaaaccataatttttttttgtca

SEQ ID NO: 22261 - DNA, 39 bp, Gossypium hirsutum
cttaacatcccaatgagataaataaagacttttgaataa

SEQ ID NO: 22262 - DNA, 22 bp, Gossypium hirsutum
tgaactatttgaaattttttca

SEQ ID NO: 22263 - DNA, 20 bp, Gossypium hirsutum
aactatttgaaagtttttca

SEQ ID NO: 22264 - DNA, 32 bp, Gossypium hirsutum
gtcactcaacttcaaaagattacaaaattgtc

SEQ ID NO: 22265 - DNA, 20 bp, Gossypium hirsutum
ctcgagtgagctggaaacga

SEQ ID NO: 22266 - DNA, 19 bp, Gossypium hirsutum
ttcgttaagctccgtttag

SEQ ID NO: 22267 - DNA, 19 bp, Gossypium hirsutum
ttcgttaagctacgtttag

SEQ ID NO: 22268 - DNA, 23 bp, Gossypium hirsutum
gcaaatccatgcgagctgaatta

SEQ ID NO: 22269 - DNA, 25 bp, Gossypium hirsutum
gtttcagtatcaattgggccttagc

SEQ ID NO: 22270 - DNA, 21 bp, Gossypium hirsutum
ctagttctgataatgtttctt

SEQ ID NO: 22271 - DNA, 21 bp, Gossypium hirsutum
ctagttctgataatatttctt

SEQ ID NO: 22272 - DNA, 27 bp, Gossypium hirsutum
gtcacctgattctgattctgattctca

SEQ ID NO: 22273 - DNA, 43 bp, Gossypium hirsutum
cactaacaatatgctaaaaagtaaattatatttcacactaact

SEQ ID NO: 22274 - DNA, 23 bp, Gossypium hirsutum
ttttatgtgatgaatctgataat

SEQ ID NO: 22275 - DNA, 23 bp, Gossypium hirsutum
ttttatgtgatgaatttgataat

SEQ ID NO: 22276 - DNA, 24 bp, Gossypium hirsutum
acttacagaaagcatgcgttccat

SEQ ID NO: 22277 - DNA, 28 bp, Gossypium hirsutum
tgtacaccttgttaattccacatcgtaa

SEQ ID NO: 22278 - DNA, 15 bp, Gossypium hirsutum
tttcccagcggccct

SEQ ID NO: 22279 - DNA, 17 bp, Gossypium hirsutum
aatttcccagtggccct

SEQ ID NO: 22280 - DNA, 30 bp, Gossypium hirsutum
agaacaaagagtcatcgacttataacacaa

SEQ ID NO: 22281 - DNA, 26 bp, Gossypium hirsutum
caatgtgaccaaaatttacccggata

SEQ ID NO: 22282 - DNA, 18 bp, Gossypium hirsutum
ttggagatcgtcgatgag

SEQ ID NO: 22283 - DNA, 21 bp, Gossypium hirsutum
atattggagatcatcgatgag

SEQ ID NO: 22284 - DNA, 22 bp, Gossypium hirsutum
tcaataagcacgtcctgttcgt

SEQ ID NO: 22285 - DNA, 31 bp, Gossypium hirsutum
aaacaagcatcttcttactatattgaagcct

SEQ ID NO: 22286 - DNA, 24 bp, Gossypium hirsutum
tttaaatgttattgaggtgtagct

SEQ ID NO: 22287 - DNA, 19 bp, Gossypium hirsutum
atgttattgaggagtagct

SEQ ID NO: 22288 - DNA, 35 bp, Gossypium hirsutum
tcgatttattttctactaggttttgtcattactgt

SEQ ID NO: 22289 - DNA, 30 bp, Gossypium hirsutum
tgtgcttaatttgagaaaatggcttaatcg

SEQ ID NO: 22290 - DNA, 20 bp, Gossypium hirsutum
cgtaaaatgaaaatttaagg

SEQ ID NO: 22291 - DNA, 20 bp, Gossypium hirsutum
cgtaaaatgaaaatttaggg

SEQ ID NO: 22292 - DNA, 28 bp, Gossypium hirsutum
gcctattttccacataaaacctcccttt

SEQ ID NO: 22293 - DNA, 24 bp, Gossypium hirsutum
ggcagtaggattgaaagtgaacca

SEQ ID NO: 22294 - DNA, 18 bp, Gossypium hirsutum
ctactgccattagacata

SEQ ID NO: 22295 - DNA, 16 bp, Gossypium hirsutum
actgccatcagacata

SEQ ID NO: 22296 - DNA, 26 bp, Gossypium hirsutum
catgcagacatatattcgaggacact

SEQ ID NO: 22297 - DNA, 25 bp, Gossypium hirsutum
ggatcacggctaaaccttacattga

SEQ ID NO: 22298 - DNA, 18 bp, Gossypium hirsutum
aagacaacacacgtttta

SEQ ID NO: 22299 - DNA, 18 bp, Gossypium hirsutum
aagacaacacatgtttta

SEQ ID NO: 22300 - DNA, 24 bp, Gossypium hirsutum
gtgacgcccaaaattggtatcttt

SEQ ID NO: 22301 - DNA, 25 bp, Gossypium hirsutum
gggagggagggtattaccattaagg

SEQ ID NO: 22302 - DNA, 21 bp, Gossypium hirsutum
tctataaatctagcaatagct

SEQ ID NO: 22303 - DNA, 15 bp, Gossypium hirsutum
aatctggcaatagct

SEQ ID NO: 22304 - DNA, 47 bp, Gossypium hirsutum
gttcaaatacctaaataaatctagttatcaaaatcatgtactaaaat

SEQ ID NO: 22305 - DNA, 40 bp, Gossypium hirsutum
gtaatgtcatataaaaaatgtacgtttgtacttagttgag

SEQ ID NO: 22306 - DNA, 19 bp, Gossypium hirsutum
aaagtagttctgttttttg

SEQ ID NO: 22307 - DNA, 19 bp, Gossypium hirsutum
aaagtagttttgttttttg

SEQ ID NO: 22308 - DNA, 33 bp, Gossypium hirsutum
acttcagacattgatacttcctttttaggtaaa

SEQ ID NO: 22309 - DNA, 21 bp, Gossypium hirsutum
cctgcagggaccttttcaaag

SEQ ID NO: 22310 - DNA, 17 bp, Gossypium hirsutum
atatgcagttggcatgc

SEQ ID NO: 22311 - DNA, 17 bp, Gossypium hirsutum
atatgcagttgacatgc

SEQ ID NO: 22312 - DNA, 28 bp, Gossypium hirsutum
atgggtatcattgaggattgaatttgga

SEQ ID NO: 22313 - DNA, 27 bp, Gossypium hirsutum
gggttggtattatcgttgattgaggtt

SEQ ID NO: 22314 - DNA, 13 bp, Gossypium hirsutum
tccagcaaaactc

SEQ ID NO: 22315 - DNA, 16 bp, Gossypium hirsutum
atatccaacaaaactc

SEQ ID NO: 22316 - DNA, 23 bp, Gossypium hirsutum
gttgttgtgcaccatgcatagtc

SEQ ID NO: 22317 - DNA, 25 bp, Gossypium hirsutum
accaaagctgtgaagtcatcaaaga

SEQ ID NO: 22318 - DNA, 15 bp, Gossypium hirsutum
cctaacagagcttgc

SEQ ID NO: 22319 - DNA, 15 bp, Gossypium hirsutum
cctaacaaagcttgc

SEQ ID NO: 22320 - DNA, 26 bp, Gossypium hirsutum
tcgcttcagaacaaattggaaacttg

SEQ ID NO: 22321 - DNA, 23 bp, Gossypium hirsutum
attccgcagtgcaacaaaagaaa

SEQ ID NO: 22322 - DNA, 20 bp, Gossypium hirsutum
ccatatgaaacaataagtac

SEQ ID NO: 22323 - DNA, 19 bp, Gossypium hirsutum
catatgaaacagtaagtac

SEQ ID NO: 22324 - DNA, 22 bp, Gossypium hirsutum
actcttctgggctggaaaagtg

SEQ ID NO: 22325 - DNA, 21 bp, Gossypium hirsutum
ttcatgccatgacctttgggt

SEQ ID NO: 22326 - DNA, 16 bp, Gossypium hirsutum
atggcatccatattga

SEQ ID NO: 22327 - DNA, 16 bp, Gossypium hirsutum
atggcatccgtattga

SEQ ID NO: 22328 - DNA, 25 bp, Gossypium hirsutum
gtcccaaacatgtcttacactagca

SEQ ID NO: 22329 - DNA, 25 bp, Gossypium hirsutum
acgcaataaactcacttccagacaa

SEQ ID NO: 22330 - DNA, 18 bp, Gossypium hirsutum
ccgtaaggaaatcaaatt

SEQ ID NO: 22331 - DNA, 18 bp, Gossypium hirsutum
ccgtaaggaaattaaatt

SEQ ID NO: 22332 - DNA, 26 bp, Gossypium hirsutum
gcccttctcttctgttattccttctt

SEQ ID NO: 22333 - DNA, 31 bp, Gossypium hirsutum
cgtagtggaagctatttcatgttcttaaaaa

SEQ ID NO: 22334 - DNA, 16 bp, Gossypium hirsutum
acacagacccatgatc

SEQ ID NO: 22335 - DNA, 18 bp, Gossypium hirsutum
atacacagactcatgatc

SEQ ID NO: 22336 - DNA, 28 bp, Gossypium hirsutum
ggaaccacccatctaattaaaattgcat

SEQ ID NO: 22337 - DNA, 44 bp, Gossypium hirsutum
atttaaacaatacaacaatatatatggttatcatttaatcgctt

SEQ ID NO: 22338 - DNA, 26 bp, Gossypium hirsutum
tgtattattctcttatttataaatta

SEQ ID NO: 22339 - DNA, 24 bp, Gossypium hirsutum
tattattctcttatttaaaaatta

SEQ ID NO: 22340 - DNA, 41 bp, Gossypium hirsutum
tgttgtctacacaaaaagatataaatttaagtatgttgaag

SEQ ID NO: 22341 - DNA, 25 bp, Gossypium hirsutum
tttccttgcctgaggttaatggatt

SEQ ID NO: 22342 - DNA, 22 bp, Gossypium hirsutum
acttggtgttaaaagcctacag

SEQ ID NO: 22343 - DNA, 21 bp, Gossypium hirsutum
cttggtgttaaaagactacag

SEQ ID NO: 22344 - DNA, 25 bp, Gossypium hirsutum
agttaggagagacatctgagcatga

SEQ ID NO: 22345 - DNA, 33 bp, Gossypium hirsutum
tcttttgggtccgttttagtacttgaatttata

SEQ ID NO: 22346 - DNA, 21 bp, Gossypium hirsutum
atgatgtgatacaattattag

SEQ ID NO: 22347 - DNA, 20 bp, Gossypium hirsutum
tgatgtgatacaattgttag

SEQ ID NO: 22348 - DNA, 35 bp, Gossypium hirsutum
ctttgaaactaggataaaaatcagtaattgaacca

SEQ ID NO: 22349 - DNA, 26 bp, Gossypium hirsutum
agccataatcctttcaccattccaat

SEQ ID NO: 22350 - DNA, 20 bp, Gossypium hirsutum
ctaaggttatacgatgctgt

SEQ ID NO: 22351 - DNA, 20 bp, Gossypium hirsutum
ctaaggttatacaatgctgt

SEQ ID NO: 22352 - DNA, 42 bp, Gossypium hirsutum
ttcctattgatctgatattattaccatttcatgaatttgata

SEQ ID NO: 22353 - DNA, 20 bp, Gossypium hirsutum
actcgtggtcaagcctgttg

SEQ ID NO: 22354 - DNA, 21 bp, Gossypium hirsutum
catgtagtatacccatgtaag

SEQ ID NO: 22355 - DNA, 21 bp, Gossypium hirsutum
catgtagtatacccgtgtaag

SEQ ID NO: 22356 - DNA, 21 bp, Gossypium hirsutum
tgtccctttggcaggattgaa

SEQ ID NO: 22357 - DNA, 18 bp, Gossypium hirsutum
ggccgatggccatttcac

SEQ ID NO: 22358 - DNA, 16 bp, Gossypium hirsutum
cttgagcacacaacag

SEQ ID NO: 22359 - DNA, 15 bp, Gossypium hirsutum
ttgagcacgcaacag

SEQ ID NO: 22360 - DNA, 24 bp, Gossypium hirsutum
tttgtatgatggcagcttgaggaa

SEQ ID NO: 22361 - DNA, 30 bp, Gossypium hirsutum
gagatgtctctaggtttagtcaaaagtcaa

SEQ ID NO: 22362 - DNA, 16 bp, Gossypium hirsutum
tgtaccacagcaaaat

SEQ ID NO: 22363 - DNA, 18 bp, Gossypium hirsutum
aatgtaccacatcaaaat

SEQ ID NO: 22364 - DNA, 30 bp, Gossypium hirsutum
catccttgttgttaaaaattccgttaatcc

SEQ ID NO: 22365 - DNA, 18 bp, Gossypium hirsutum
tggctgagctggctgatc

SEQ ID NO: 22366 - DNA, 19 bp, Gossypium hirsutum
cagcattttcctgtgaaga

SEQ ID NO: 22367 - DNA, 19 bp, Gossypium hirsutum
cagcattttcctatgaaga

SEQ ID NO: 22368 - DNA, 30 bp, Gossypium hirsutum
aagcttgaaaatttacacagccataatgtt

SEQ ID NO: 22369 - DNA, 25 bp, Gossypium hirsutum
ggttagtggtgagaaagccaattca

SEQ ID NO: 22370 - DNA, 15 bp, Gossypium hirsutum
agactgttgaaaacc

SEQ ID NO: 22371 - DNA, 15 bp, Gossypium hirsutum
agactgttaaaaacc

SEQ ID NO: 22372 - DNA, 25 bp, Gossypium hirsutum
cgaaaaccctattgcttccaaatga

SEQ ID NO: 22373 - DNA, 27 bp, Gossypium hirsutum
ggaaagaggaagataggtcaacagaaa

SEQ ID NO: 22374 - DNA, 14 bp, Gossypium hirsutum
cccagcattgcttc

SEQ ID NO: 22375 - DNA, 13 bp, Gossypium hirsutum
ccagcagtgcttc

SEQ ID NO: 22376 - DNA, 26 bp, Gossypium hirsutum
agaagtttttatagggccagcttgtt

SEQ ID NO: 22377 - DNA, 27 bp, Gossypium hirsutum
atgaatgcaaatgcaaaaggtaacaga

SEQ ID NO: 22378 - DNA, 14 bp, Gossypium hirsutum
cacaaccagaaacc

SEQ ID NO: 22379 - DNA, 15 bp, Gossypium hirsutum
ccacaactagaaacc

SEQ ID NO: 22380 - DNA, 32 bp, Gossypium hirsutum
gtgaaaattcggtgtggttttcttttttattt

SEQ ID NO: 22381 - DNA, 22 bp, Gossypium hirsutum
gccattcacctgatgcacaaaa

SEQ ID NO: 22382 - DNA, 21 bp, Gossypium hirsutum
atatttaaagttccaattttt

SEQ ID NO: 22383 - DNA, 18 bp, Gossypium hirsutum
tttaaagttcgaattttt

SEQ ID NO: 22384 - DNA, 28 bp, Gossypium hirsutum
ggatttactgtttcaggatttgggtgat

SEQ ID NO: 22385 - DNA, 45 bp, Gossypium hirsutum
tgaatattgcaaaagttttaaatataaaccccttaaaatagaatt

SEQ ID NO: 22386 - DNA, 23 bp, Gossypium hirsutum
ataaaattacattttgacccttc

SEQ ID NO: 22387 - DNA, 19 bp, Gossypium hirsutum
aattacattttggcccttc

SEQ ID NO: 22388 - DNA, 38 bp, Gossypium hirsutum
gaggtcgaaattaaattgttcagttttacgataataaa

SEQ ID NO: 22389 - DNA, 31 bp, Gossypium hirsutum
gcgaacttcataccttgatttacttgagata

SEQ ID NO: 22390 - DNA, 20 bp, Gossypium hirsutum
aaaaagaataaggaacccca

SEQ ID NO: 22391 - DNA, 19 bp, Gossypium hirsutum
aaaagaaaaaggaacccca

SEQ ID NO: 22392 - DNA, 29 bp, Gossypium hirsutum
ccagtttctctttaacaagtcaagtggta

SEQ ID NO: 22393 - DNA, 31 bp, Gossypium hirsutum
aattataaggtctaaaggccaaagttcaagt

SEQ ID NO: 22394 - DNA, 19 bp, Gossypium hirsutum
tcccttaaaaaaaaaccag

SEQ ID NO: 22395 - DNA, 18 bp, Gossypium hirsutum
tcccttaaaaaaaaccag

SEQ ID NO: 22396 - DNA, 20 bp, Gossypium hirsutum
gggttcaagccttggctctt

SEQ ID NO: 22397 - DNA, 22 bp, Gossypium hirsutum
atgagtgcgtgtatgtgtacgt

SEQ ID NO: 22398 - DNA, 19 bp, Gossypium hirsutum
ctcaatgatacgtaaacat

SEQ ID NO: 22399 - DNA, 19 bp, Gossypium hirsutum
ctcaatgatacataaacat

SEQ ID NO: 22400 - DNA, 25 bp, Gossypium hirsutum
aagcttagctatttagcgagttccc

SEQ ID NO: 22401 - DNA, 22 bp, Gossypium hirsutum
aagcgtccattaccatccttgt

SEQ ID NO: 22402 - DNA, 16 bp, Gossypium hirsutum
caacttgagacatttt

SEQ ID NO: 22403 - DNA, 16 bp, Gossypium hirsutum
caacttgaaacatttt

SEQ ID NO: 22404 - DNA, 23 bp, Gossypium hirsutum
tcatcatggaatcccacattgca

SEQ ID NO: 22405 - DNA, 25 bp, Gossypium hirsutum
tgtctttttggcagctaatgtacca

SEQ ID NO: 22406 - DNA, 15 bp, Gossypium hirsutum
actggcaatgggttc

SEQ ID NO: 22407 - DNA, 14 bp, Gossypium hirsutum
ctggcaaagggttc

SEQ ID NO: 22408 - DNA, 25 bp, Gossypium hirsutum
cactcgaaacaatgaccatttccag

SEQ ID NO: 22409 - DNA, 33 bp, Gossypium hirsutum
ccttacagataaaagtgtcttaaagttaagggt

SEQ ID NO: 22410 - DNA, 16 bp, Gossypium hirsutum
acttggcaaagacaaa

SEQ ID NO: 22411 - DNA, 20 bp, Gossypium hirsutum
taaaacttggtaaagacaaa

SEQ ID NO: 22412 - DNA, 30 bp, Gossypium hirsutum
acaaaaggcatttgttagaaagtcaatcaa

SEQ ID NO: 22413 - DNA, 31 bp, Gossypium hirsutum
ggagagaagttgagagaaaacttttttgttt

SEQ ID NO: 22414 - DNA, 15 bp, Gossypium hirsutum
caaaacggcgccgtt

SEQ ID NO: 22415 - DNA, 15 bp, Gossypium hirsutum
caaaacggcaccgtt

SEQ ID NO: 22416 - DNA, 19 bp, Gossypium hirsutum
cgagccgttttggcatctg

SEQ ID NO: 22417 - DNA, 30 bp, Gossypium hirsutum
acaaccccacaatcttcaaaatagtgttat

SEQ ID NO: 22418 - DNA, 17 bp, Gossypium hirsutum
acaagcaagtacacatc

SEQ ID NO: 22419 - DNA, 15 bp, Gossypium hirsutum
aagcaaggacacatc

SEQ ID NO: 22420 - DNA, 22 bp, Gossypium hirsutum
gcctattgcagtgttgcttctc

SEQ ID NO: 22421 - DNA, 30 bp, Gossypium hirsutum
caaaaacttcttcatatcacttcgattgct

SEQ ID NO: 22422 - DNA, 24 bp, Gossypium hirsutum
ctaaaaagagagattcgtatataa

SEQ ID NO: 22423 - DNA, 19 bp, Gossypium hirsutum
aagagagattcgtataaaa

SEQ ID NO: 22424 - DNA, 25 bp, Gossypium hirsutum
acactgaatatggcaagaccttcaa

SEQ ID NO: 22425 - DNA, 25 bp, Gossypium hirsutum
ccaacaatcaagacccgaaccataa

SEQ ID NO: 22426 - DNA, 14 bp, Gossypium hirsutum
caccagcggttcac

SEQ ID NO: 22427 - DNA, 14 bp, Gossypium hirsutum
caccagtggttcac

SEQ ID NO: 22428 - DNA, 27 bp, Gossypium hirsutum
acaccctgtattgttgaggatcataga

SEQ ID NO: 22429 - DNA, 28 bp, Gossypium hirsutum
cacctgatgagattatcccttgaaatga

SEQ ID NO: 22430 - DNA, 19 bp, Gossypium hirsutum
acccctaaattgatagaaa

SEQ ID NO: 22431 - DNA, 19 bp, Gossypium hirsutum
acccctaaattcatagaaa

SEQ ID NO: 22432 - DNA, 24 bp, Gossypium hirsutum
aaaatgcgatcacatcacgtgaac

SEQ ID NO: 22433 - DNA, 48 bp, Gossypium hirsutum
gacagatcttttataaataaggaattatggtttgaaattatatcattt

SEQ ID NO: 22434 - DNA, 21 bp, Gossypium hirsutum
ttcaatcactttaactaaatc

SEQ ID NO: 22435 - DNA, 19 bp, Gossypium hirsutum
caatcactttagctaaatc

SEQ ID NO: 22436 - DNA, 34 bp, Gossypium hirsutum
accgtttaatgaggaaagtaaattgataagaaga

SEQ ID NO: 22437 - DNA, 27 bp, Gossypium hirsutum
cagtaagttaggacacaatgtctcgaa

SEQ ID NO: 22438 - DNA, 21 bp, Gossypium hirsutum
atacgtgaatgaatactaaaa

SEQ ID NO: 22439 - DNA, 18 bp, Gossypium hirsutum
cgtgaatgaatgctaaaa

SEQ ID NO: 22440 - DNA, 27 bp, Gossypium hirsutum
ctggtcgtgatcccttttttaaaatcc

SEQ ID NO: 22441 - DNA, 22 bp, Gossypium hirsutum
cctgcctgtccttgcttactag

SEQ ID NO: 22442 - DNA, 25 bp, Gossypium hirsutum
atctatactgtattaattagatctt

SEQ ID NO: 22443 - DNA, 21 bp, Gossypium hirsutum
atactgtattacttagatctt

SEQ ID NO: 22444 - DNA, 26 bp, Gossypium hirsutum
caatcgagcatctcaaatcaatggtt

SEQ ID NO: 22445 - DNA, 25 bp, Gossypium hirsutum
cacttgctcctttctttccaaacaa

SEQ ID NO: 22446 - DNA, 16 bp, Gossypium hirsutum
cacgtgagaccaaaat

SEQ ID NO: 22447 - DNA, 15 bp, Gossypium hirsutum
cacgtgagaccaaat

SEQ ID NO: 22448 - DNA, 25 bp, Gossypium hirsutum
aacgatttgcttgaaagttggacaa

SEQ ID NO: 22449 - DNA, 26 bp, Gossypium hirsutum
ctacaagaggcatggatgagtaactt

SEQ ID NO: 22450 - DNA, 19 bp, Gossypium hirsutum
cactaagttgagaaccgta

SEQ ID NO: 22451 - DNA, 19 bp, Gossypium hirsutum
cactaagttgagatccgta

SEQ ID NO: 22452 - DNA, 29 bp, Gossypium hirsutum
cttccacaaagcactaaaatgtttgatct

SEQ ID NO: 22453 - DNA, 32 bp, Gossypium hirsutum
gttttcttatcaacgtggatattcttcaaact

SEQ ID NO: 22454 - DNA, 15 bp, Gossypium hirsutum
ccacattgatctttg

SEQ ID NO: 22455 - DNA, 15 bp, Gossypium hirsutum
ccacattggtctttg

SEQ ID NO: 22456 - DNA, 27 bp, Gossypium hirsutum
ggaccaaaatgaatttagttgccaagt

SEQ ID NO: 22457 - DNA, 28 bp, Gossypium hirsutum
ttgcaattcaactcccaatcatttcatt

SEQ ID NO: 22458 - DNA, 23 bp, Gossypium hirsutum
ctagaagtagctattaacgttct

SEQ ID NO: 22459 - DNA, 19 bp, Gossypium hirsutum
aagtagctattgacgttct

SEQ ID NO: 22460 - DNA, 22 bp, Gossypium hirsutum
gttccttgaagctttccatgca

SEQ ID NO: 22461 - DNA, 23 bp, Gossypium hirsutum
accaaacaggtacaagtcgtcaa

SEQ ID NO: 22462 - DNA, 19 bp, Gossypium hirsutum
ctgactgtcaatataatat

SEQ ID NO: 22463 - DNA, 19 bp, Gossypium hirsutum
ctgactgtcaatataacat

SEQ ID NO: 22464 - DNA, 23 bp, Gossypium hirsutum
tgaaactccttgttgagcaacct

SEQ ID NO: 22465 - DNA, 25 bp, Gossypium hirsutum
ggtcctcaccattatgacactcaat

SEQ ID NO: 22466 - DNA, 16 bp, Gossypium hirsutum
atggatgccattcaca

SEQ ID NO: 22467 - DNA, 16 bp, Gossypium hirsutum
atggatgccagtcaca

SEQ ID NO: 22468 - DNA, 35 bp, Gossypium hirsutum
gctgctaaatgataaagatttagatttgataagca

SEQ ID NO: 22469 - DNA, 20 bp, Gossypium hirsutum
ccaccatgccacaacttctg

SEQ ID NO: 22470 - DNA, 15 bp, Gossypium hirsutum
tccaaccaactttct

SEQ ID NO: 22471 - DNA, 14 bp, Gossypium hirsutum
ccaaccgactttct

SEQ ID NO: 22472 - DNA, 25 bp, Gossypium hirsutum
agtgggttctagttttgcagtgaaa

SEQ ID NO: 22473 - DNA, 28 bp, Gossypium hirsutum
ccaccaatattacaatcatcgaatgcaa

SEQ ID NO: 22474 - DNA, 18 bp, Gossypium hirsutum
caatcgtttcctcctgac

SEQ ID NO: 22475 - DNA, 18 bp, Gossypium hirsutum
caatcgtttccacctgac

SEQ ID NO: 22476 - DNA, 24 bp, Gossypium hirsutum
ggtatgttgcgggatgcatttaat

SEQ ID NO: 22477 - DNA, 32 bp, Gossypium hirsutum
cctgattgataggaaaagtgaaagagatagaa

SEQ ID NO: 22478 - DNA, 19 bp, Gossypium hirsutum
tttcggaaagtttgattta

SEQ ID NO: 22479 - DNA, 18 bp, Gossypium hirsutum
ttcggaaagtttaattta

SEQ ID NO: 22480 - DNA, 20 bp, Gossypium hirsutum
tctgcgtttccgttgttgga

SEQ ID NO: 22481 - DNA, 27 bp, Gossypium hirsutum
cgatcaatctattggttttctgcttgt

SEQ ID NO: 22482 - DNA, 19 bp, Gossypium hirsutum
atatttcccctaacaattg

SEQ ID NO: 22483 - DNA, 20 bp, Gossypium hirsutum
tatatttccactaacaattg

SEQ ID NO: 22484 - DNA, 25 bp, Gossypium hirsutum
gcactacttgaggtcctatcccatt

SEQ ID NO: 22485 - DNA, 25 bp, Gossypium hirsutum
caaagcaacaaagccttcaacaatt

SEQ ID NO: 22486 - DNA, 21 bp, Gossypium hirsutum
ctaaatgagaatctggaagtt

SEQ ID NO: 22487 - DNA, 22 bp, Gossypium hirsutum
tctaaatgagaatatggaagtt

SEQ ID NO: 22488 - DNA, 27 bp, Gossypium hirsutum
cacccaattctttgaagtgcttaatct

SEQ ID NO: 22489 - DNA, 34 bp, Gossypium hirsutum
gcaataaaatctgataatagcactcaaagaagaa

SEQ ID NO: 22490 - DNA, 14 bp, Gossypium hirsutum
acttcaccaaaatc

SEQ ID NO: 22491 - DNA, 17 bp, Gossypium hirsutum
ttaacttcactaaaatc

SEQ ID NO: 22492 - DNA, 23 bp, Gossypium hirsutum
tctcctttgattgaggacagggt

SEQ ID NO: 22493 - DNA, 29 bp, Gossypium hirsutum
tgcttgacaagtaggttcgtttattaact

SEQ ID NO: 22494 - DNA, 19 bp, Gossypium hirsutum
caggtcttaaccattatgt

SEQ ID NO: 22495 - DNA, 19 bp, Gossypium hirsutum
caggtcttaaccgttatgt

SEQ ID NO: 22496 - DNA, 29 bp, Gossypium hirsutum
aaggtgatactatgatgtaactcgagtca

SEQ ID NO: 22497 - DNA, 28 bp, Gossypium hirsutum
aaagctcaaaaatcatggatcatgttgt

SEQ ID NO: 22498 - DNA, 18 bp, Gossypium hirsutum
atcatggcgtttactaaa

SEQ ID NO: 22499 - DNA, 15 bp, Gossypium hirsutum
atggcgtttgctaaa

SEQ ID NO: 22500 - DNA, 29 bp, Gossypium hirsutum
cggcaatggtggcatttttttaatatact

SEQ ID NO: 22501 - DNA, 27 bp, Gossypium hirsutum
tccaactcaacctcggatacctaatat

SEQ ID NO: 22502 - DNA, 17 bp, Gossypium hirsutum
accgcaaatgctaataa

SEQ ID NO: 22503 - DNA, 19 bp, Gossypium hirsutum
ctaccgcaaattctaataa

SEQ ID NO: 22504 - DNA, 24 bp, Gossypium hirsutum
cctgacaggaatcgggttctaatt

SEQ ID NO: 22505 - DNA, 27 bp, Gossypium hirsutum
gtaaaacttcaatgcgtcgataatggt

SEQ ID NO: 22506 - DNA, 20 bp, Gossypium hirsutum
cctaattattttgcaaaaag

SEQ ID NO: 22507 - DNA, 20 bp, Gossypium hirsutum
cctaattattttgcgaaaag

SEQ ID NO: 22508 - DNA, 28 bp, Gossypium hirsutum
gcaggtagagactattaaattggtcgaa

SEQ ID NO: 22509 - DNA, 43 bp, Gossypium hirsutum
aaagctacttccaaatatttacatattttagttacaaaattgt

SEQ ID NO: 22510 - DNA, 24 bp, Gossypium hirsutum
ctagtcaataaacaacacttacta

SEQ ID NO: 22511 - DNA, 22 bp, Gossypium hirsutum
tagtcaataaacaacacttata

SEQ ID NO: 22512 - DNA, 25 bp, Gossypium hirsutum
ttgcattcatgcatgcagttagaaa

SEQ ID NO: 22513 - DNA, 25 bp, Gossypium hirsutum
ccacatgacgtggagtattcagtta

SEQ ID NO: 22514 - DNA, 16 bp, Gossypium hirsutum
ccccgtataacttaaa

SEQ ID NO: 22515 - DNA, 15 bp, Gossypium hirsutum
cccgtatgacttaaa

SEQ ID NO: 22516 - DNA, 28 bp, Gossypium hirsutum
gagcaagaaacaagtgggaattttaagt

SEQ ID NO: 22517 - DNA, 19 bp, Gossypium hirsutum
tcctggtcccaacctcgat

SEQ ID NO: 22518 - DNA, 13 bp, Gossypium hirsutum
ctgctccaaaatc

SEQ ID NO: 22519 - DNA, 13 bp, Gossypium hirsutum
ctgctacaaaatc

SEQ ID NO: 22520 - DNA, 29 bp, Gossypium hirsutum
ctacaagatctctcttaactccattgaca

SEQ ID NO: 22521 - DNA, 27 bp, Gossypium hirsutum
cgggtcaatttcgtatttaaggagctt

SEQ ID NO: 22522 - DNA, 22 bp, Gossypium hirsutum
ttaaaaatggaaatgagagtcg

SEQ ID NO: 22523 - DNA, 17 bp, Gossypium hirsutum
aatggaaatgggagtcg

SEQ ID NO: 22524 - DNA, 19 bp, Gossypium hirsutum
cccttcctcgtgcgtaacc

SEQ ID NO: 22525 - DNA, 25 bp, Gossypium hirsutum
tgcatttgtgccaggaagattgata

SEQ ID NO: 22526 - DNA, 19 bp, Gossypium hirsutum
tcagacaatgtgctgatag

SEQ ID NO: 22527 - DNA, 18 bp, Gossypium hirsutum
cagacaatgtgttgatag

SEQ ID NO: 22528 - DNA, 26 bp, Gossypium hirsutum
ccctttctttccctgtcttttatgct

SEQ ID NO: 22529 - DNA, 25 bp, Gossypium hirsutum
gatagaggaaggagtacgacaggtt

SEQ ID NO: 22530 - DNA, 15 bp, Gossypium hirsutum
cactgcctgcatcca

SEQ ID NO: 22531 - DNA, 14 bp, Gossypium hirsutum
actgccagcatcca

SEQ ID NO: 22532 - DNA, 25 bp, Gossypium hirsutum
atctctgccatttccttcactttct

SEQ ID NO: 22533 - DNA, 25 bp, Gossypium hirsutum
gatggttaggtcacgtgtgtagtac

SEQ ID NO: 22534 - DNA, 19 bp, Gossypium hirsutum
ctttacgtacccgttaact

SEQ ID NO: 22535 - DNA, 19 bp, Gossypium hirsutum
ctttacgtacctgttaact

SEQ ID NO: 22536 - DNA, 25 bp, Gossypium hirsutum
ctgatacatgtagtagcctgcactt

SEQ ID NO: 22537 - DNA, 34 bp, Gossypium hirsutum
agtgtttttttctctaaagtattttttgttggga

SEQ ID NO: 22538 - DNA, 21 bp, Gossypium hirsutum
aaattttcagcttccccaaaa

SEQ ID NO: 22539 - DNA, 21 bp, Gossypium hirsutum
aaattttcagcttctccaaaa

SEQ ID NO: 22540 - DNA, 26 bp, Gossypium hirsutum
tcaaatcaaaaattggcccaagaaca

SEQ ID NO: 22541 - DNA, 28 bp, Gossypium hirsutum
ccttttaagtgccacaatctcaacatat

SEQ ID NO: 22542 - DNA, 23 bp, Gossypium hirsutum
aatggttttttttatgatttaat

SEQ ID NO: 22543 - DNA, 21 bp, Gossypium hirsutum
atggtttttttatgatttaat

SEQ ID NO: 22544 - DNA, 35 bp, Gossypium hirsutum
gcacaagtttatgtccaatatttgtatcttaatga

SEQ ID NO: 22545 - DNA, 23 bp, Gossypium hirsutum
gaagcgttgaaatcgacaagcaa

SEQ ID NO: 22546 - DNA, 23 bp, Gossypium hirsutum
tcattgaattcttttcttctttt

SEQ ID NO: 22547 - DNA, 20 bp, Gossypium hirsutum
ttgaattcttttcatctttt

SEQ ID NO: 22548 - DNA, 32 bp, Gossypium hirsutum
agaacttattcatcatatatctccccttccat

SEQ ID NO: 22549 - DNA, 25 bp, Gossypium hirsutum
tttgcttcagtttgtcttgcagatc

SEQ ID NO: 22550 - DNA, 19 bp, Gossypium hirsutum
atgtttctgataaagtttt

SEQ ID NO: 22551 - DNA, 19 bp, Gossypium hirsutum
atgtttctgataaggtttt

SEQ ID NO: 22552 - DNA, 29 bp, Gossypium hirsutum
gcttaaactggctatcagaaacatcaatt

SEQ ID NO: 22553 - DNA, 29 bp, Gossypium hirsutum
accatatctttacaaacaacactagtgca

SEQ ID NO: 22554 - DNA, 14 bp, Gossypium hirsutum
ctagggcaagaaac

SEQ ID NO: 22555 - DNA, 14 bp, Gossypium hirsutum
ctagggcgagaaac

SEQ ID NO: 22556 - DNA, 31 bp, Gossypium hirsutum
cagttgcaagaattaactaatagaggtttcg

SEQ ID NO: 22557 - DNA, 25 bp, Gossypium hirsutum
gcaagtccaaatacagcatcttgtt

SEQ ID NO: 22558 - DNA, 17 bp, Gossypium hirsutum
ttgaagattgaaaattt

SEQ ID NO: 22559 - DNA, 17 bp, Gossypium hirsutum
ttgaagattgacaattt

SEQ ID NO: 22560 - DNA, 27 bp, Gossypium hirsutum
cctggttcaaaacttagcaatttgtct

SEQ ID NO: 22561 - DNA, 35 bp, Gossypium hirsutum
tgtcaaacataaaacaatttttttacctctcaaca

SEQ ID NO: 22562 - DNA, 24 bp, Gossypium hirsutum
ttttaatctttttttttaaaattg

SEQ ID NO: 22563 - DNA, 22 bp, Gossypium hirsutum
tttaatcttttttttaaaattg

SEQ ID NO: 22564 - DNA, 28 bp, Gossypium hirsutum
ccagctaaccactttagtttggtttaga

SEQ ID NO: 22565 - DNA, 25 bp, Gossypium hirsutum
tgggatgtcatttaccacagtgttt

SEQ ID NO: 22566 - DNA, 16 bp, Gossypium hirsutum
ctcatgtgagcttgag

SEQ ID NO: 22567 - DNA, 16 bp, Gossypium hirsutum
ctcatgtgaacttgag

SEQ ID NO: 22568 - DNA, 26 bp, Gossypium hirsutum
atttcgggttattctcaacgagatca

SEQ ID NO: 22569 - DNA, 28 bp, Gossypium hirsutum
cgggatctcagtaaagataactctaagg

SEQ ID NO: 22570 - DNA, 19 bp, Gossypium hirsutum
cacaataacacgttacctt

SEQ ID NO: 22571 - DNA, 19 bp, Gossypium hirsutum
cacaataacacattacctt

SEQ ID NO: 22572 - DNA, 26 bp, Gossypium hirsutum
gcacgatttcatgatggaacatgtta

SEQ ID NO: 22573 - DNA, 28 bp, Gossypium hirsutum
gtgttgtttcttgtttcagtactcgatt

SEQ ID NO: 22574 - DNA, 20 bp, Gossypium hirsutum
cttttttttccccttttatc

SEQ ID NO: 22575 - DNA, 19 bp, Gossypium hirsutum
ctttttttccccttttatc

SEQ ID NO: 22576 - DNA, 28 bp, Gossypium hirsutum
cctgataagcttcctaaaccaaatctct

SEQ ID NO: 22577 - DNA, 28 bp, Gossypium hirsutum
agtgatatggttcgatcaaatcttccaa

SEQ ID NO: 22578 - DNA, 19 bp, Gossypium hirsutum
aaatggcatgatattccta

SEQ ID NO: 22579 - DNA, 18 bp, Gossypium hirsutum
aatggcatgatcttccta

SEQ ID NO: 22580 - DNA, 30 bp, Gossypium hirsutum
gagattgttttcgtatttgtgtagttgaca

SEQ ID NO: 22581 - DNA, 26 bp, Gossypium hirsutum
tggagtgcatttgaaacaaacctttt

SEQ ID NO: 22582 - DNA, 18 bp, Gossypium hirsutum
aacaagcccttcttatct

SEQ ID NO: 22583 - DNA, 15 bp, Gossypium hirsutum
aagcccttcatatct

SEQ ID NO: 22584 - DNA, 30 bp, Gossypium hirsutum
gatatttcaaattttcaggttggcattgtg

SEQ ID NO: 22585 - DNA, 24 bp, Gossypium hirsutum
gttcttgggctctagtttgctttt

SEQ ID NO: 22586 - DNA, 16 bp, Gossypium hirsutum
tttgttgtggaatacc

SEQ ID NO: 22587 - DNA, 15 bp, Gossypium hirsutum
ttgttgtgaaatacc

SEQ ID NO: 22588 - DNA, 33 bp, Gossypium hirsutum
tggcctttgacaataatttttaaagttgaatga

SEQ ID NO: 22589 - DNA, 25 bp, Gossypium hirsutum
ggccgacatttaacgtactttttca

SEQ ID NO: 22590 - DNA, 17 bp, Gossypium hirsutum
cgagaaaatgaattaat

SEQ ID NO: 22591 - DNA, 17 bp, Gossypium hirsutum
cgagaaaaagaattaat

SEQ ID NO: 22592 - DNA, 22 bp, Gossypium hirsutum
gacacgtgcgtggtttatatgg

SEQ ID NO: 22593 - DNA, 22 bp, Gossypium hirsutum
ctccgcagcagatctacctaaa

SEQ ID NO: 22594 - DNA, 22 bp, Gossypium hirsutum
ctagatcatgatttttgacatc

SEQ ID NO: 22595 - DNA, 21 bp, Gossypium hirsutum
ctagatcatgattttgacatc

SEQ ID NO: 22596 - DNA, 29 bp, Gossypium hirsutum
tctggaacttgatagctagttgttttctt

SEQ ID NO: 22597 - DNA, 14 bp, Gossypium hirsutum
gggcgggtcgggtt

SEQ ID NO: 22598 - DNA, 18 bp, Gossypium hirsutum
caattgcaatatttcaac

SEQ ID NO: 22599 - DNA, 17 bp, Gossypium hirsutum
caattgcaatattcaac

SEQ ID NO: 22600 - DNA, 28 bp, Gossypium hirsutum
tcgataaatacattgttagtggctgcat

SEQ ID NO: 22601 - DNA, 26 bp, Gossypium hirsutum
gaatgaatttggtggttttgggagtt

SEQ ID NO: 22602 - DNA, 21 bp, Gossypium hirsutum
atattggcatccatctattaa

SEQ ID NO: 22603 - DNA, 19 bp, Gossypium hirsutum
attggcatccatttattaa

SEQ ID NO: 22604 - DNA, 27 bp, Gossypium hirsutum
tgttaatggacattcaaaagggagtgt

SEQ ID NO: 22605 - DNA, 25 bp, Gossypium hirsutum
tcgagtcattgctaacacgatcaaa

SEQ ID NO: 22606 - DNA, 24 bp, Gossypium hirsutum
ttcttagaaattataaaaaaatac

SEQ ID NO: 22607 - DNA, 22 bp, Gossypium hirsutum
tcttagaaattataaaaaatac

SEQ ID NO: 22608 - DNA, 33 bp, Gossypium hirsutum
ctaaatttctcaaaaaagctcttaaagctctct

SEQ ID NO: 22609 - DNA, 29 bp, Gossypium hirsutum
acagaagcctcaactaaaaaaaaagcaaa

SEQ ID NO: 22610 - DNA, 17 bp, Gossypium hirsutum
aaatgcatgtgacacgc

SEQ ID NO: 22611 - DNA, 15 bp, Gossypium hirsutum
atgcatgtggcacgc

SEQ ID NO: 22612 - DNA, 28 bp, Gossypium hirsutum
ttgttgaaatttggtgtggttgatgaaa

SEQ ID NO: 22613 - DNA, 31 bp, Gossypium hirsutum
tcgagttgttttttgtactagttctaaccaa

SEQ ID NO: 22614 - DNA, 22 bp, Gossypium hirsutum
caaagagtattttctggaagtt

SEQ ID NO: 22615 - DNA, 21 bp, Gossypium hirsutum
aaagagtattttctagaagtt

SEQ ID NO: 22616 - DNA, 30 bp, Gossypium hirsutum
aagttttttgagctcatgaaaaatcccttt

SEQ ID NO: 22617 - DNA, 20 bp, Gossypium hirsutum
ccaagcctcgttacaaccct

SEQ ID NO: 22618 - DNA, 17 bp, Gossypium hirsutum
acatcaatcaaaatgtc

SEQ ID NO: 22619 - DNA, 16 bp, Gossypium hirsutum
catcaatcaaaaggtc

SEQ ID NO: 22620 - DNA, 27 bp, Gossypium hirsutum
tgcatgaaaatcaaatctccaccacta

SEQ ID NO: 22621 - DNA, 32 bp, Gossypium hirsutum
aaagcaagggcttaattgattttctctaaaaa

SEQ ID NO: 22622 - DNA, 23 bp, Gossypium hirsutum
ttaagggtgtaaaaaatcttcaa

SEQ ID NO: 22623 - DNA, 21 bp, Gossypium hirsutum
aagggtgtaaaaaatcctcaa

SEQ ID NO: 22624 - DNA, 44 bp, Gossypium hirsutum
tcccttactcaatctattaataaatacaaataaagaatgtcatt

SEQ ID NO: 22625 - DNA, 21 bp, Gossypium hirsutum
atgtgcacgtcccctcaatag

SEQ ID NO: 22626 - DNA, 21 bp, Gossypium hirsutum
catacgtgatatatggaacac

SEQ ID NO: 22627 - DNA, 18 bp, Gossypium hirsutum
acgtgatatatgaaacac

SEQ ID NO: 22628 - DNA, 24 bp, Gossypium hirsutum
tggaaccacctcgttaaatcgaat

SEQ ID NO: 22629 - DNA, 32 bp, Gossypium hirsutum
ggtccttgaaatctaacaactaattcttcact

SEQ ID NO: 22630 - DNA, 20 bp, Gossypium hirsutum
caaaagaagctcatacaaaa

SEQ ID NO: 22631 - DNA, 18 bp, Gossypium hirsutum
aaagaagctcatgcaaaa

SEQ ID NO: 22632 - DNA, 23 bp, Gossypium hirsutum
catggaacttctgatgcaacagt

SEQ ID NO: 22633 - DNA, 25 bp, Gossypium hirsutum
tgtggttaaaatttgcgacaaccaa

SEQ ID NO: 22634 - DNA, 26 bp, Gossypium hirsutum
taactaacagtaataccttattatat

SEQ ID NO: 22635 - DNA, 23 bp, Gossypium hirsutum
ctaacagtaataccctattatat

SEQ ID NO: 22636 - DNA, 22 bp, Gossypium hirsutum
tgaaccatcgagccatcacatg

SEQ ID NO: 22637 - DNA, 28 bp, Gossypium hirsutum
cttcatctgatgagtcgtcatctatgtt

SEQ ID NO: 22638 - DNA, 20 bp, Gossypium hirsutum
ataaaaaaacgtaaaaaaaa

SEQ ID NO: 22639 - DNA, 19 bp, Gossypium hirsutum
ataaaaaacgtaaaaaaaa

SEQ ID NO: 22640 - DNA, 35 bp, Gossypium hirsutum
gtgttttataggactggaaatcatattcattttgt

SEQ ID NO: 22641 - DNA, 24 bp, Gossypium hirsutum
caaggttagagagcatgggaatcc

SEQ ID NO: 22642 - DNA, 19 bp, Gossypium hirsutum
catggtctaattaagatac

SEQ ID NO: 22643 - DNA, 18 bp, Gossypium hirsutum
catggtctaataagatac

SEQ ID NO: 22644 - DNA, 28 bp, Gossypium hirsutum
gccctattttggtgctgagtaatgataa

SEQ ID NO: 22645 - DNA, 25 bp, Gossypium hirsutum
caaccatacttgtccagtgagatga

SEQ ID NO: 22646 - DNA, 19 bp, Gossypium hirsutum
atcaactcatgacttaaaa

SEQ ID NO: 22647 - DNA, 19 bp, Gossypium hirsutum
atcaactcatgacctaaaa

SEQ ID NO: 22648 - DNA, 29 bp, Gossypium hirsutum
ctatatgatattgtgccattcaagccaac

SEQ ID NO: 22649 - DNA, 29 bp, Gossypium hirsutum
ggctgaggattggctagtaattattacaa

SEQ ID NO: 22650 - DNA, 14 bp, Gossypium hirsutum
cagcagctttttct

SEQ ID NO: 22651 - DNA, 14 bp, Gossypium hirsutum
acagcagcttttct

SEQ ID NO: 22652 - DNA, 22 bp, Gossypium hirsutum
tggtgttctttgcggttcttct

SEQ ID NO: 22653 - DNA, 23 bp, Gossypium hirsutum
gcggtttgctttacactgtttgt

SEQ ID NO: 22654 - DNA, 17 bp, Gossypium hirsutum
caacacaacagtcaaaa

SEQ ID NO: 22655 - DNA, 17 bp, Gossypium hirsutum
caacacaacaatcaaaa

SEQ ID NO: 22656 - DNA, 26 bp, Gossypium hirsutum
tgaccatcaacctaagaaagaacgaa

SEQ ID NO: 22657 - DNA, 43 bp, Gossypium hirsutum
gttaacttcattctgatttgactttatttagttcttttgaata

SEQ ID NO: 22658 - DNA, 19 bp, Gossypium hirsutum
ccttgtattatgggaaact

SEQ ID NO: 22659 - DNA, 20 bp, Gossypium hirsutum
tccttgtattataggaaact

SEQ ID NO: 22660 - DNA, 29 bp, Gossypium hirsutum
acggttgtaactaataatacggcaaatgt

SEQ ID NO: 22661 - DNA, 27 bp, Gossypium hirsutum
catggatgctctgttctgaatataggt

SEQ ID NO: 22662 - DNA, 18 bp, Gossypium hirsutum
cttcacattgtcatcaag

SEQ ID NO: 22663 - DNA, 17 bp, Gossypium hirsutum
ttcacattgtaatcaag

SEQ ID NO: 22664 - DNA, 25 bp, Gossypium hirsutum
cgagacatggcaaaattgagagagt

SEQ ID NO: 22665 - DNA, 25 bp, Gossypium hirsutum
tcttgactgtgacagccctaaattg

SEQ ID NO: 22666 - DNA, 16 bp, Gossypium hirsutum
accctagtcagaaagt

SEQ ID NO: 22667 - DNA, 15 bp, Gossypium hirsutum
ccctagtcggaaagt

SEQ ID NO: 22668 - DNA, 18 bp, Gossypium hirsutum
cggtttcgtggtcccgaa

SEQ ID NO: 22669 - DNA, 33 bp, Gossypium hirsutum
caatcaattttcatcaaataaaccctaagacca

SEQ ID NO: 22670 - DNA, 17 bp, Gossypium hirsutum
aacgcaaaattaaaaaa

SEQ ID NO: 22671 - DNA, 21 bp, Gossypium hirsutum
attaaacgcaaaattagaaaa

SEQ ID NO: 22672 - DNA, 37 bp, Gossypium hirsutum
gctaatattattagggttggatttttcgtaattttgt

SEQ ID NO: 22673 - DNA, 25 bp, Gossypium hirsutum
ccacctagacaccgaccctatataa

SEQ ID NO: 22674 - DNA, 15 bp, Gossypium hirsutum
ccacccaagagaaat

SEQ ID NO: 22675 - DNA, 14 bp, Gossypium hirsutum
cacccaggagaaat

SEQ ID NO: 22676 - DNA, 17 bp, Gossypium hirsutum
ggagccggaggattgca

SEQ ID NO: 22677 - DNA, 25 bp, Gossypium hirsutum
gcaacaaatgtgcagagaataacca

SEQ ID NO: 22678 - DNA, 19 bp, Gossypium hirsutum
tcgtgagagttttattgtt

SEQ ID NO: 22679 - DNA, 18 bp, Gossypium hirsutum
cgtgagagttttgttgtt

SEQ ID NO: 22680 - DNA, 21 bp, Gossypium hirsutum
gcagcttgtatcagccgtttt

SEQ ID NO: 22681 - DNA, 25 bp, Gossypium hirsutum
agatgctgcactcactttaactcaa

SEQ ID NO: 22682 - DNA, 16 bp, Gossypium hirsutum
atgacgtcgattcatt

SEQ ID NO: 22683 - DNA, 17 bp, Gossypium hirsutum
aatgacgtcgtttcatt

SEQ ID NO: 22684 - DNA, 37 bp, Gossypium hirsutum
agttcagggattaaaagttatgttaacccttaataaa

SEQ ID NO: 22685 - DNA, 28 bp, Gossypium hirsutum
acttattggtttcatgggaaaagcattg

SEQ ID NO: 22686 - DNA, 17 bp, Gossypium hirsutum
cccatcatcaatcaact

SEQ ID NO: 22687 - DNA, 16 bp, Gossypium hirsutum
ccatcatcaaacaact

SEQ ID NO: 22688 - DNA, 23 bp, Gossypium hirsutum
gaataagacccatcaccgactct

SEQ ID NO: 22689 - DNA, 35 bp, Gossypium hirsutum
aatgaaagtaggaaaaaacagaataatccaattcc

SEQ ID NO: 22690 - DNA, 19 bp, Gossypium hirsutum
aaattgaagtagaaatcca

SEQ ID NO: 22691 - DNA, 18 bp, Gossypium hirsutum
aattgaagtaggaatcca

SEQ ID NO: 22692 - DNA, 41 bp, Gossypium hirsutum
ggaagatattatttttatttttgtttttagtaaaccccatg

SEQ ID NO: 22693 - DNA, 29 bp, Gossypium hirsutum
tggtgaagtaaaaactcaaaacgaaagac

SEQ ID NO: 22694 - DNA, 20 bp, Gossypium hirsutum
ttagaaactcggaacactga

SEQ ID NO: 22695 - DNA, 16 bp, Gossypium hirsutum
aaactcggaagactga

SEQ ID NO: 22696 - DNA, 30 bp, Gossypium hirsutum
atgtagcttcttcccaatgtagaaattctt

SEQ ID NO: 22697 - DNA, 27 bp, Gossypium hirsutum
gcactttatgctatagtctctgcatca

SEQ ID NO: 22698 - DNA, 20 bp, Gossypium hirsutum
acgtacttatcaaattaaat

SEQ ID NO: 22699 - DNA, 19 bp, Gossypium hirsutum
cgtacttatcaagttaaat

SEQ ID NO: 22700 - DNA, 25 bp, Gossypium hirsutum
gcattctcatgggcagagtaagttt

SEQ ID NO: 22701 - DNA, 26 bp, Gossypium hirsutum
gcttaccaccagtctgttaaagaaga

SEQ ID NO: 22702 - DNA, 20 bp, Gossypium hirsutum
ttacgagatgcatttaatat

SEQ ID NO: 22703 - DNA, 20 bp, Gossypium hirsutum
ttacgagatgcatttgatat

SEQ ID NO: 22704 - DNA, 24 bp, Gossypium hirsutum
ggtggaaatgattgcaaaccatga

SEQ ID NO: 22705 - DNA, 24 bp, Gossypium hirsutum
ttgtggaggaggaaaactttggaa

SEQ ID NO: 22706 - DNA, 21 bp, Gossypium hirsutum
acacaaaaaataagaataaaa

SEQ ID NO: 22707 - DNA, 21 bp, Gossypium hirsutum
acacaaaaaataaaaataaaa

SEQ ID NO: 22708 - DNA, 23 bp, Gossypium hirsutum
cgagattcctttcttctgccctc

SEQ ID NO: 22709 - DNA, 27 bp, Gossypium hirsutum
tgagtgagatttaggttggagatagct

SEQ ID NO: 22710 - DNA, 18 bp, Gossypium hirsutum
actaccaggttgtcctat

SEQ ID NO: 22711 - DNA, 18 bp, Gossypium hirsutum
actaccaggttatcctat

SEQ ID NO: 22712 - DNA, 25 bp, Gossypium hirsutum
cgaaggctagtggagaagatgaaat

SEQ ID NO: 22713 - DNA, 44 bp, Gossypium hirsutum
gctcttttcggatttatatacatatattccttatgattattagt

SEQ ID NO: 22714 - DNA, 20 bp, Gossypium hirsutum
cctaattacaaccccttttt

SEQ ID NO: 22715 - DNA, 19 bp, Gossypium hirsutum
cctaattacaacccttttt

SEQ ID NO: 22716 - DNA, 25 bp, Gossypium hirsutum
ggtcatacgaaaacccgactcttaa

SEQ ID NO: 22717 - DNA, 29 bp, Gossypium hirsutum
gacaaatagtgtgccatatgtacatcatg

SEQ ID NO: 22718 - DNA, 18 bp, Gossypium hirsutum
cttcatacaaaaaatttt

SEQ ID NO: 22719 - DNA, 17 bp, Gossypium hirsutum
ttcatacaaagaatttt

SEQ ID NO: 22720 - DNA, 42 bp, Gossypium hirsutum
gtccattactacttcttagattagagtatatctatggtaaaa

SEQ ID NO: 22721 - DNA, 25 bp, Gossypium hirsutum
ccattttcttggagtttgagcagaa

SEQ ID NO: 22722 - DNA, 17 bp, Gossypium hirsutum
cacggatctcatcaaaa

SEQ ID NO: 22723 - DNA, 16 bp, Gossypium hirsutum
acggatctgatcaaaa

SEQ ID NO: 22724 - DNA, 25 bp, Gossypium hirsutum
gtgggttgatgttcttcgaggatta

SEQ ID NO: 22725 - DNA, 29 bp, Gossypium hirsutum
caatcaaccacagaaatcactcaaattct

SEQ ID NO: 22726 - DNA, 23 bp, Gossypium hirsutum
caaaattgtaagtgtcagtgtag

SEQ ID NO: 22727 - DNA, 19 bp, Gossypium hirsutum
attgtaagtgtcaatgtag

SEQ ID NO: 22728 - DNA, 35 bp, Gossypium hirsutum
gcatgttgttttgattgtgtttttatgtatactca

SEQ ID NO: 22729 - DNA, 25 bp, Gossypium hirsutum
gcacagaaatgacaaaccaacagta

SEQ ID NO: 22730 - DNA, 25 bp, Gossypium hirsutum
attttacctttattaatgataactt

SEQ ID NO: 22731 - DNA, 24 bp, Gossypium hirsutum
ttttacctttattaatgatagctt

SEQ ID NO: 22732 - DNA, 23 bp, Gossypium hirsutum
gtgcccgaattttgttcttgaca

SEQ ID NO: 22733 - DNA, 29 bp, Gossypium hirsutum
tggcatgtataggacctctttataatggt

SEQ ID NO: 22734 - DNA, 18 bp, Gossypium hirsutum
attgaccattgacacatt

SEQ ID NO: 22735 - DNA, 20 bp, Gossypium hirsutum
aaattgaccattaacacatt

SEQ ID NO: 22736 - DNA, 29 bp, Gossypium hirsutum
agcccatcaaacaaaacataaacttcaaa

SEQ ID NO: 22737 - DNA, 41 bp, Gossypium hirsutum
tctatatatgtgtaaatgtgtaaatgtgtaaatgtgtatgt

SEQ ID NO: 22738 - DNA, 21 bp, Gossypium hirsutum
caactccatacatatacatac

SEQ ID NO: 22739 - DNA, 19 bp, Gossypium hirsutum
actccatacatacacatac

SEQ ID NO: 22740 - DNA, 27 bp, Gossypium hirsutum
ccaaccattccttatcttccactttct

SEQ ID NO: 22741 - DNA, 25 bp, Gossypium hirsutum
gcacaacacaagaatgaaacccaat

SEQ ID NO: 22742 - DNA, 18 bp, Gossypium hirsutum
aaccaagaatgaaccaaa

SEQ ID NO: 22743 - DNA, 17 bp, Gossypium hirsutum
accaagaatgcaccaaa

SEQ ID NO: 22744 - DNA, 27 bp, Gossypium hirsutum
gcatctaagccctttatttgtcttgtt

SEQ ID NO: 22745 - DNA, 26 bp, Gossypium hirsutum
atcactgatgtctctctgtgttcaac

SEQ ID NO: 22746 - DNA, 15 bp, Gossypium hirsutum
cctgagggtaccgcc

SEQ ID NO: 22747 - DNA, 14 bp, Gossypium hirsutum
ctgaggataccgcc

SEQ ID NO: 22748 - DNA, 33 bp, Gossypium hirsutum
tgaaaggaaaataaaaaacacatacaatgacca

SEQ ID NO: 22749 - DNA, 25 bp, Gossypium hirsutum
agggaaaaaaccccatcgaaaacta

SEQ ID NO: 22750 - DNA, 19 bp, Gossypium hirsutum
attcgaagtatcgtttgtc

SEQ ID NO: 22751 - DNA, 18 bp, Gossypium hirsutum
ttcgaagtatcatttgtc

SEQ ID NO: 22752 - DNA, 25 bp, Gossypium hirsutum
gcgttattctgggatgttacatgag

SEQ ID NO: 22753 - DNA, 35 bp, Gossypium hirsutum
acttttggtttatttgtatgttaaaattgttccgt

SEQ ID NO: 22754 - DNA, 17 bp, Gossypium hirsutum
atcggctttttttaaac

SEQ ID NO: 22755 - DNA, 16 bp, Gossypium hirsutum
tcggcttttttaaaac

SEQ ID NO: 22756 - DNA, 40 bp, Gossypium hirsutum
tcccttaaaatttataattcattgttgactccttaaaaac

SEQ ID NO: 22757 - DNA, 31 bp, Gossypium hirsutum
ggtaaactaatgctttatgcttcaaacttca

SEQ ID NO: 22758 - DNA, 21 bp, Gossypium hirsutum
catctcatattctccattcta

SEQ ID NO: 22759 - DNA, 18 bp, Gossypium hirsutum
ctcatattctgcattcta

SEQ ID NO: 22760 - DNA, 26 bp, Gossypium hirsutum
ggaaaaatccagcaagaaagtaacca

SEQ ID NO: 22761 - DNA, 25 bp, Gossypium hirsutum
agctcaagccctagtgtggatataa

SEQ ID NO: 22762 - DNA, 16 bp, Gossypium hirsutum
ctcacattgaagcctg

SEQ ID NO: 22763 - DNA, 16 bp, Gossypium hirsutum
ctcacattaaagcctg

SEQ ID NO: 22764 - DNA, 28 bp, Gossypium hirsutum
ttgaggtttggacttgataattgttcct

SEQ ID NO: 22765 - DNA, 25 bp, Gossypium hirsutum
cagggagatatccaagtcgtaatgc

SEQ ID NO: 22766 - DNA, 19 bp, Gossypium hirsutum
aaagtctcccatgttacag

SEQ ID NO: 22767 - DNA, 19 bp, Gossypium hirsutum
aaagtctcccatattacag

SEQ ID NO: 22768 - DNA, 26 bp, Gossypium hirsutum
tttggtcaggccaattagtacagttt

SEQ ID NO: 22769 - DNA, 28 bp, Gossypium hirsutum
agggcttgaaattgttaggaaaagatga

SEQ ID NO: 22770 - DNA, 18 bp, Gossypium hirsutum
atttcaaggatagaaaat

SEQ ID NO: 22771 - DNA, 14 bp, Gossypium hirsutum
caaggctagaaaat

SEQ ID NO: 22772 - DNA, 29 bp, Gossypium hirsutum
gagcaatgagcatcaaggataatattgac

SEQ ID NO: 22773 - DNA, 27 bp, Gossypium hirsutum
cattttggccctaaatgacaaattagc

SEQ ID NO: 22774 - DNA, 18 bp, Gossypium hirsutum
cattcttcaaaattttct

SEQ ID NO: 22775 - DNA, 18 bp, Gossypium hirsutum
cattcttcaaatttttct

SEQ ID NO: 22776 - DNA, 41 bp, Gossypium hirsutum
caaattaataattaaccatttcaattaacgttgcacataat

SEQ ID NO: 22777 - DNA, 24 bp, Gossypium hirsutum
ccctaagcgtgtcttatcatccat

SEQ ID NO: 22778 - DNA, 17 bp, Gossypium hirsutum
tcggattcaagttgtct

SEQ ID NO: 22779 - DNA, 17 bp, Gossypium hirsutum
tcggattcaacttgtct

SEQ ID NO: 22780 - DNA, 33 bp, Gossypium hirsutum
ggaacatcgattcgaaaagaaatcattaaattg

SEQ ID NO: 22781 - DNA, 34 bp, Gossypium hirsutum
caccattaagttgtttctactgatttaaaaagga

SEQ ID NO: 22782 - DNA, 21 bp, Gossypium hirsutum
tcaattccaattaaattcact

SEQ ID NO: 22783 - DNA, 21 bp, Gossypium hirsutum
tcaattccaattaaactcact

SEQ ID NO: 22784 - DNA, 29 bp, Gossypium hirsutum
ggtacatgctacacaatcacaaaattagc

SEQ ID NO: 22785 - DNA, 29 bp, Gossypium hirsutum
cttctgaactttttacatccaactgagtt

SEQ ID NO: 22786 - DNA, 18 bp, Gossypium hirsutum
tgatgtgacactgttaac

SEQ ID NO: 22787 - DNA, 16 bp, Gossypium hirsutum
atgtgacacagttaac

SEQ ID NO: 22788 - DNA, 28 bp, Gossypium hirsutum
gtgacactaccacattagtttttgacaa

SEQ ID NO: 22789 - DNA, 27 bp, Gossypium hirsutum
caacagatctcgcaatttgaagaatca

SEQ ID NO: 22790 - DNA, 18 bp, Gossypium hirsutum
cttttactcagaaactca

SEQ ID NO: 22791 - DNA, 18 bp, Gossypium hirsutum
cttttactcagcaactca

SEQ ID NO: 22792 - DNA, 34 bp, Gossypium hirsutum
ggcctacccacaattagtattattttatttttgt

SEQ ID NO: 22793 - DNA, 25 bp, Gossypium hirsutum
gccattgtacagtacctgaaaagga

SEQ ID NO: 22794 - DNA, 13 bp, Gossypium hirsutum
acgaccaaaacac

SEQ ID NO: 22795 - DNA, 13 bp, Gossypium hirsutum
acgaccgaaacac

SEQ ID NO: 22796 - DNA, 26 bp, Gossypium hirsutum
accttggttgatgtatgcttttcact

SEQ ID NO: 22797 - DNA, 46 bp, Gossypium hirsutum
tggtaaaataaaataaaagtaaaatccctatagaactatacttctt

SEQ ID NO: 22798 - DNA, 22 bp, Gossypium hirsutum
tttagaataaggctttttaaac

SEQ ID NO: 22799 - DNA, 23 bp, Gossypium hirsutum
ttttagaataaggttttttaaac

SEQ ID NO: 22800 - DNA, 38 bp, Gossypium hirsutum
gaaacaccttattctaatcaatatcaaatagatggagt

SEQ ID NO: 22801 - DNA, 25 bp, Gossypium hirsutum
gctgatctgatgaaacttccgtttg

SEQ ID NO: 22802 - DNA, 18 bp, Gossypium hirsutum
tgcttcactaaccagtcc

SEQ ID NO: 22803 - DNA, 16 bp, Gossypium hirsutum
cttcaccaaccagtcc

SEQ ID NO: 22804 - DNA, 26 bp, Gossypium hirsutum
gtcctcagaaccatcctttttttagc

SEQ ID NO: 22805 - DNA, 35 bp, Gossypium hirsutum
aaaagctgaaagaaaattaatctaatcctactcct

SEQ ID NO: 22806 - DNA, 17 bp, Gossypium hirsutum
tcatcctagattccttc

SEQ ID NO: 22807 - DNA, 17 bp, Gossypium hirsutum
tcatcctagatgccttc

SEQ ID NO: 22808 - DNA, 27 bp, Gossypium hirsutum
cgaagacctaagactttctgaagaact

SEQ ID NO: 22809 - DNA, 26 bp, Gossypium hirsutum
gaagagacaatgcggtaacaatgatg

SEQ ID NO: 22810 - DNA, 17 bp, Gossypium hirsutum
atcagtcattgattctg

SEQ ID NO: 22811 - DNA, 15 bp, Gossypium hirsutum
cagtcagtgattctg

SEQ ID NO: 22812 - DNA, 28 bp, Gossypium hirsutum
gctgtgttgtgataaaactgaatgatgt

SEQ ID NO: 22813 - DNA, 24 bp, Gossypium hirsutum
gcatggttgagatttgcaaactgt

SEQ ID NO: 22814 - DNA, 18 bp, Gossypium hirsutum
actttcattgctattctt

SEQ ID NO: 22815 - DNA, 18 bp, Gossypium hirsutum
actttcattgctatcctt

SEQ ID NO: 22816 - DNA, 26 bp, Gossypium hirsutum
gggttactgaattgcaaagctttaca

SEQ ID NO: 22817 - DNA, 28 bp, Gossypium hirsutum
aaaaacgcaacagggaatctaatttctc

SEQ ID NO: 22818 - DNA, 15 bp, Gossypium hirsutum
cagtgcagaagtaaa

SEQ ID NO: 22819 - DNA, 15 bp, Gossypium hirsutum
cagtgcacaagtaaa

SEQ ID NO: 22820 - DNA, 34 bp, Gossypium hirsutum
acaaataaaagcaaaaggtgatgttttttcattg

SEQ ID NO: 22821 - DNA, 29 bp, Gossypium hirsutum
tgtaaaagaacgacaaatacaaggaccat

SEQ ID NO: 22822 - DNA, 20 bp, Gossypium hirsutum
caaatgaaagtatcaacatt

SEQ ID NO: 22823 - DNA, 19 bp, Gossypium hirsutum
aaatgaaagtctcaacatt

SEQ ID NO: 22824 - DNA, 28 bp, Gossypium hirsutum
ctggtaattaagctgtttaggacaatgg

SEQ ID NO: 22825 - DNA, 24 bp, Gossypium hirsutum
ccctttccttctgttcctcttgaa

SEQ ID NO: 22826 - DNA, 16 bp, Gossypium hirsutum
tctgagcaagaattta

SEQ ID NO: 22827 - DNA, 15 bp, Gossypium hirsutum
ctgagcaaaaattta

SEQ ID NO: 22828 - DNA, 25 bp, Gossypium hirsutum
cagtggttcgagggaaaatgtagaa

SEQ ID NO: 22829 - DNA, 30 bp, Gossypium hirsutum
cattacgtactatggtaacacatcacatct

SEQ ID NO: 22830 - DNA, 21 bp, Gossypium hirsutum
tttatcttcactaattaaaac

SEQ ID NO: 22831 - DNA, 21 bp, Gossypium hirsutum
tttatcttcactagttaaaac

SEQ ID NO: 22832 - DNA, 28 bp, Gossypium hirsutum
tgtcttaaaaggtttgatgtgagttcga

SEQ ID NO: 22833 - DNA, 25 bp, Gossypium hirsutum
gtacgagtctttagaagccacttgt

SEQ ID NO: 22834 - DNA, 20 bp, Gossypium hirsutum
atatcatgaaatcagaacat

SEQ ID NO: 22835 - DNA, 16 bp, Gossypium hirsutum
catgaaagcagaacat

SEQ ID NO: 22836 - DNA, 29 bp, Gossypium hirsutum
ctggatgaagctacaatataaggagttct

SEQ ID NO: 22837 - DNA, 29 bp, Gossypium hirsutum
tccctttctatttatggtgtgatatgcaa

SEQ ID NO: 22838 - DNA, 19 bp, Gossypium hirsutum
aagtctcccttctgcatta

SEQ ID NO: 22839 - DNA, 19 bp, Gossypium hirsutum
aagtctcccttttgcatta

SEQ ID NO: 22840 - DNA, 35 bp, Gossypium hirsutum
ggtgttcaaagtcaaatattaacttaaatagtgca

SEQ ID NO: 22841 - DNA, 30 bp, Gossypium hirsutum
atctctaagatgcttacattcattcatgca

SEQ ID NO: 22842 - DNA, 17 bp, Gossypium hirsutum
caacggttgtacacgtt

SEQ ID NO: 22843 - DNA, 16 bp, Gossypium hirsutum
aacggttgaacacgtt

SEQ ID NO: 22844 - DNA, 26 bp, Gossypium hirsutum
gtgacaaagtctctagctaaccgatt

SEQ ID NO: 22845 - DNA, 34 bp, Gossypium hirsutum
gaagctaaacccagaagtcttattttgattttat

SEQ ID NO: 22846 - DNA, 21 bp, Gossypium hirsutum
atgatcaaaatataaatttac

SEQ ID NO: 22847 - DNA, 21 bp, Gossypium hirsutum
atgatcaaaatataaacttac

SEQ ID NO: 22848 - DNA, 30 bp, Gossypium hirsutum
tgacgggaaataattcaccgtattaattgt

SEQ ID NO: 22849 - DNA, 26 bp, Gossypium hirsutum
acaatgtgagtcggctattgattcag

SEQ ID NO: 22850 - DNA, 17 bp, Gossypium hirsutum
ttcgtgtaaagttttct

SEQ ID NO: 22851 - DNA, 16 bp, Gossypium hirsutum
tcgtgtaaaattttct

SEQ ID NO: 22852 - DNA, 25 bp, Gossypium hirsutum
cccggatgaacagataaacaaccat

SEQ ID NO: 22853 - DNA, 25 bp, Gossypium hirsutum
gcttgcctttcttttgcctatactt

SEQ ID NO: 22854 - DNA, 21 bp, Gossypium hirsutum
aaagacgagtatacacacaca

SEQ ID NO: 22855 - DNA, 22 bp, Gossypium hirsutum
caaagacgagtatactcacaca

SEQ ID NO: 22856 - DNA, 28 bp, Gossypium hirsutum
agcacattcatgcactaaagaaaatcaa

SEQ ID NO: 22857 - DNA, 20 bp, Gossypium hirsutum
gccatccctgtgttgaagga

SEQ ID NO: 22858 - DNA, 15 bp, Gossypium hirsutum
caccatgactgtccc

SEQ ID NO: 22859 - DNA, 14 bp, Gossypium hirsutum
accatgcctgtccc

SEQ ID NO: 22860 - DNA, 33 bp, Gossypium hirsutum
gtaaataagagaacttgaaattacctcaaagca

SEQ ID NO: 22861 - DNA, 29 bp, Gossypium hirsutum
gacaacagtttttattattcaggttgcga

SEQ ID NO: 22862 - DNA, 20 bp, Gossypium hirsutum
actatttttgacaatgaaac

SEQ ID NO: 22863 - DNA, 16 bp, Gossypium hirsutum
tttttggcaatgaaac

SEQ ID NO: 22864 - DNA, 21 bp, Gossypium hirsutum
gcaaacatccgcccaaaagtt

SEQ ID NO: 22865 - DNA, 30 bp, Gossypium hirsutum
ttgaaactaaagtaactgttttgtcaacgg

SEQ ID NO: 22866 - DNA, 20 bp, Gossypium hirsutum
catcaaagttgaatgatgtt

SEQ ID NO: 22867 - DNA, 19 bp, Gossypium hirsutum
atcaaagttgagtgatgtt

SEQ ID NO: 22868 - DNA, 33 bp, Gossypium hirsutum
atcttgtgaatttgttttcatttcaacagtagt

SEQ ID NO: 22869 - DNA, 26 bp, Gossypium hirsutum
tcgtccaatttccacctttgattaca

SEQ ID NO: 22870 - DNA, 26 bp, Gossypium hirsutum
tcaattaatttaatttgataatttat

SEQ ID NO: 22871 - DNA, 24 bp, Gossypium hirsutum
aattaatttaatttgatcatttat

SEQ ID NO: 22872 - DNA, 25 bp, Gossypium hirsutum
gacgatcagattaggcgataagtgt

SEQ ID NO: 22873 - DNA, 32 bp, Gossypium hirsutum
ggctcaccgattttatttatgaaaaagaaaga

SEQ ID NO: 22874 - DNA, 20 bp, Gossypium hirsutum
cattgattactgttaaccga

SEQ ID NO: 22875 - DNA, 20 bp, Gossypium hirsutum
cattgattactgttaactga

SEQ ID NO: 22876 - DNA, 25 bp, Gossypium hirsutum
tcgtcaatccttggtaaaaggaact

SEQ ID NO: 22877 - DNA, 23 bp, Gossypium hirsutum
attcccaaaggatcgtcaaggtc

SEQ ID NO: 22878 - DNA, 20 bp, Gossypium hirsutum
ttaaagataccccgaagata

SEQ ID NO: 22879 - DNA, 20 bp, Gossypium hirsutum
ttaaagatacccagaagata

SEQ ID NO: 22880 - DNA, 24 bp, Gossypium hirsutum
ggattggctgctcttggatatcag

SEQ ID NO: 22881 - DNA, 27 bp, Gossypium hirsutum
gcattaagttgcaaccaaatgaacaac

SEQ ID NO: 22882 - DNA, 22 bp, Gossypium hirsutum
caaactacataaaaatgcatcc

SEQ ID NO: 22883 - DNA, 21 bp, Gossypium hirsutum
aaactacataaaaatacatcc

SEQ ID NO: 22884 - DNA, 22 bp, Gossypium hirsutum
cgccccatagacataggaaagg

SEQ ID NO: 22885 - DNA, 28 bp, Gossypium hirsutum
gcacaacagaaaaatcaagcattaacag

SEQ ID NO: 22886 - DNA, 18 bp, Gossypium hirsutum
atgctatctacgatcacg

SEQ ID NO: 22887 - DNA, 20 bp, Gossypium hirsutum
tcatgctatctactatcacg

SEQ ID NO: 22888 - DNA, 48 bp, Gossypium hirsutum
ggatttagagaagatacttttaaagaattaaaattaaaaacctagttt

SEQ ID NO: 22889 - DNA, 20 bp, Gossypium hirsutum
ccgaactgttgcagtaagca

SEQ ID NO: 22890 - DNA, 21 bp, Gossypium hirsutum
tattacattgttcattttatc

SEQ ID NO: 22891 - DNA, 21 bp, Gossypium hirsutum
tattacattgttccttttatc

SEQ ID NO: 22892 - DNA, 29 bp, Gossypium hirsutum
gagcttagtgaaagaagagagtatttgga

SEQ ID NO: 22893 - DNA, 25 bp, Gossypium hirsutum
ttcatgcaaatttgtgtccggaaaa

SEQ ID NO: 22894 - DNA, 25 bp, Gossypium hirsutum
ttataatgtaaagtgattttttttt

SEQ ID NO: 22895 - DNA, 20 bp, Gossypium hirsutum
atgtaaagtgattatttttt

SEQ ID NO: 22896 - DNA, 46 bp, Gossypium hirsutum
gagtctagattaattggattttttagtaactttcaattttagaatt

SEQ ID NO: 22897 - DNA, 21 bp, Gossypium hirsutum
cttaggtgccccttggatgac

SEQ ID NO: 22898 - DNA, 19 bp, Gossypium hirsutum
aagtcatacagggtaacat

SEQ ID NO: 22899 - DNA, 20 bp, Gossypium hirsutum
caagtcatacagagtaacat

SEQ ID NO: 22900 - DNA, 32 bp, Gossypium hirsutum
ggtggtagatagcaaaatttaatgatgaagag

SEQ ID NO: 22901 - DNA, 24 bp, Gossypium hirsutum
agtatacttagcatgccacgtgtt

SEQ ID NO: 22902 - DNA, 20 bp, Gossypium hirsutum
ctagttgttctatcaatcac

SEQ ID NO: 22903 - DNA, 16 bp, Gossypium hirsutum
ttgttctgtcaatcac

SEQ ID NO: 22904 - DNA, 42 bp, Gossypium hirsutum
attaatctttatatgttagatcaaacaacaaattggttcttt

SEQ ID NO: 22905 - DNA, 25 bp, Gossypium hirsutum
ctgaaagtgagcattgggactcata

SEQ ID NO: 22906 - DNA, 24 bp, Gossypium hirsutum
cttcagtaggaaattaatagtaag

SEQ ID NO: 22907 - DNA, 21 bp, Gossypium hirsutum
cagtaggaaattaagagtaag

SEQ ID NO: 22908 - DNA, 38 bp, Gossypium hirsutum
aaaccacatactacatgaactattagcataatttaact

SEQ ID NO: 22909 - DNA, 31 bp, Gossypium hirsutum
gtcataaaagtgtgatttagtggaaattggg

SEQ ID NO: 22910 - DNA, 19 bp, Gossypium hirsutum
tttaagcctagctgaatca

SEQ ID NO: 22911 - DNA, 19 bp, Gossypium hirsutum
tttaagcctagatgaatca

SEQ ID NO: 22912 - DNA, 30 bp, Gossypium hirsutum
cccctaaactttcacttatttacactttgg

SEQ ID NO: 22913 - DNA, 44 bp, Gossypium hirsutum
tctcttttatgttcatttttgttgattatttgttaatatgatgt

SEQ ID NO: 22914 - DNA, 22 bp, Gossypium hirsutum
aaaaggagaaatgatagcatta

SEQ ID NO: 22915 - DNA, 20 bp, Gossypium hirsutum
aaggagaaatgataacatta

SEQ ID NO: 22916 - DNA, 28 bp, Gossypium hirsutum
actaggttgtctgtttgattgtgaagtt

SEQ ID NO: 22917 - DNA, 27 bp, Gossypium hirsutum
ttgagttacgggcatttctaatccttt

SEQ ID NO: 22918 - DNA, 19 bp, Gossypium hirsutum
tctctaatcacaggttaac

SEQ ID NO: 22919 - DNA, 19 bp, Gossypium hirsutum
tctctaatcactggttaac

SEQ ID NO: 22920 - DNA, 25 bp, Gossypium hirsutum
gcctactcaccatccctaacgataa

SEQ ID NO: 22921 - DNA, 29 bp, Gossypium hirsutum
tcgatcacactatcaattggatatttggg

SEQ ID NO: 22922 - DNA, 21 bp, Gossypium hirsutum
ttatacatgccatcctcaaaa

SEQ ID NO: 22923 - DNA, 19 bp, Gossypium hirsutum
atacatgccatactcaaaa

SEQ ID NO: 22924 - DNA, 29 bp, Gossypium hirsutum
caacacatttggctaatcaatatgacaca

SEQ ID NO: 22925 - DNA, 33 bp, Gossypium hirsutum
cagaagaaaaattttagagaaatgaaccaacca

SEQ ID NO: 22926 - DNA, 16 bp, Gossypium hirsutum
cagctcaagttttgct

SEQ ID NO: 22927 - DNA, 16 bp, Gossypium hirsutum
cagctcaaattttgct

SEQ ID NO: 22928 - DNA, 23 bp, Gossypium hirsutum
ggtcatggagattgttgccgatt

SEQ ID NO: 22929 - DNA, 33 bp, Gossypium hirsutum
ggaagttagcttcttccacttaatttttatacc

SEQ ID NO: 22930 - DNA, 22 bp, Gossypium hirsutum
catttgattttttttcatcttt

SEQ ID NO: 22931 - DNA, 21 bp, Gossypium hirsutum
catttgatttttttcatcttt

SEQ ID NO: 22932 - DNA, 39 bp, Gossypium hirsutum
aaacggaaatgaaatagtagtaaaggagataaaaataga

SEQ ID NO: 22933 - DNA, 34 bp, Gossypium hirsutum
gcgtctacgtaactcttttcattttatctttatt

SEQ ID NO: 22934 - DNA, 23 bp, Gossypium hirsutum
ttccatatgatttttttttctca

SEQ ID NO: 22935 - DNA, 22 bp, Gossypium hirsutum
ttccatatgattttttttctca

SEQ ID NO: 22936 - DNA, 34 bp, Gossypium hirsutum
tcgcaaagatatatatgactattttcatgttggt

SEQ ID NO: 22937 - DNA, 24 bp, Gossypium hirsutum
acaggaagttgtgggttctctttt

SEQ ID NO: 22938 - DNA, 18 bp, Gossypium hirsutum
ttagtggtagctgtgctc

SEQ ID NO: 22939 - DNA, 18 bp, Gossypium hirsutum
ttagtggtagctctgctc

SEQ ID NO: 22940 - DNA, 34 bp, Gossypium hirsutum
tgtaattattctttctttttgagaaggtctctgt

SEQ ID NO: 22941 - DNA, 23 bp, Gossypium hirsutum
agttgctgatgtgtacctgcaaa

SEQ ID NO: 22942 - DNA, 19 bp, Gossypium hirsutum
caaagcttcaaacactatt

SEQ ID NO: 22943 - DNA, 18 bp, Gossypium hirsutum
aaagcttcaaaaactatt

SEQ ID NO: 22944 - DNA, 25 bp, Gossypium hirsutum
ggtcaccctgacatatttgacagaa

SEQ ID NO: 22945 - DNA, 28 bp, Gossypium hirsutum
atcttggagtcttgagttagcaaatgat

SEQ ID NO: 22946 - DNA, 22 bp, Gossypium hirsutum
tcaaaatataactgccaccaat

SEQ ID NO: 22947 - DNA, 20 bp, Gossypium hirsutum
aaaatataactgcgaccaat

SEQ ID NO: 22948 - DNA, 25 bp, Gossypium hirsutum
tgactggtgccatcttctttgaaaa

SEQ ID NO: 22949 - DNA, 18 bp, Gossypium hirsutum
gccgctcatcaggttcct

SEQ ID NO: 22950 - DNA, 22 bp, Gossypium hirsutum
caaaaagaaatcaaagctaata

SEQ ID NO: 22951 - DNA, 22 bp, Gossypium hirsutum
caaaaagaaatcaaaactaata

SEQ ID NO: 22952 - DNA, 30 bp, Gossypium hirsutum
tgaagcacagactagtaatattaagaccga

SEQ ID NO: 22953 - DNA, 25 bp, Gossypium hirsutum
ggctcgatatttgcacgataaacaa

SEQ ID NO: 22954 - DNA, 24 bp, Gossypium hirsutum
ttacttggtaaaaaaaagtaaaaa

SEQ ID NO: 22955 - DNA, 21 bp, Gossypium hirsutum
acttggtaaaaaaagtaaaaa

SEQ ID NO: 22956 - DNA, 50 bp, Gossypium hirsutum
tctttaattaatgaatttcaatagaaattattcaagaaaaatactctctc

SEQ ID NO: 22957 - DNA, 29 bp, Gossypium hirsutum
tgcttagaattacccatagtctctcttca

SEQ ID NO: 22958 - DNA, 17 bp, Gossypium hirsutum
tgcgctaaaacgcatta

SEQ ID NO: 22959 - DNA, 17 bp, Gossypium hirsutum
tgcgctaaaacacatta

SEQ ID NO: 22960 - DNA, 18 bp, Gossypium hirsutum
aggaggacgtgggttcga

SEQ ID NO: 22961 - DNA, 24 bp, Gossypium hirsutum
gccaccatggaagtctgatgatat

SEQ ID NO: 22962 - DNA, 22 bp, Gossypium hirsutum
tgttaaagaaatactcattttt

SEQ ID NO: 22963 - DNA, 23 bp, Gossypium hirsutum
ttgttaaagaaatacttattttt

SEQ ID NO: 22964 - DNA, 35 bp, Gossypium hirsutum
catgaacaatcaataacttcagttcaagataagaa

SEQ ID NO: 22965 - DNA, 42 bp, Gossypium hirsutum
actataaataaatattgggtaaatatcactgtttgtaactca

SEQ ID NO: 22966 - DNA, 16 bp, Gossypium hirsutum
cagatgacaacaaaat

SEQ ID NO: 22967 - DNA, 15 bp, Gossypium hirsutum
agatgacaaaaaaat

SEQ ID NO: 22968 - DNA, 50 bp, Gossypium hirsutum
gtaaattgacatagtttataaatattgagggttaaaattactattatgtt

SEQ ID NO: 22969 - DNA, 30 bp, Gossypium hirsutum
acccatgttttttgacacgatacaaatttt

SEQ ID NO: 22970 - DNA, 26 bp, Gossypium hirsutum
atattgatataaaaaaatacaaaaat

SEQ ID NO: 22971 - DNA, 23 bp, Gossypium hirsutum
attgatataaaaaatacaaaaat

SEQ ID NO: 22972 - DNA, 33 bp, Gossypium hirsutum
acatgaatcccatattgatattccgaatatgac

SEQ ID NO: 22973 - DNA, 24 bp, Gossypium hirsutum
ctaacacccaacatgcagaaactg

SEQ ID NO: 22974 - DNA, 14 bp, Gossypium hirsutum
aggccaggcacatg

SEQ ID NO: 22975 - DNA, 15 bp, Gossypium hirsutum
caggccagacacatg

SEQ ID NO: 22976 - DNA, 26 bp, Gossypium hirsutum
accaaaatgaagagttggagtgatgt

SEQ ID NO: 22977 - DNA, 30 bp, Gossypium hirsutum
gggtggtagaatatctattatacgggtgaa

SEQ ID NO: 22978 - DNA, 16 bp, Gossypium hirsutum
ttttgtcgaagaggcc

SEQ ID NO: 22979 - DNA, 16 bp, Gossypium hirsutum
ttttgtccaagaggcc

SEQ ID NO: 22980 - DNA, 42 bp, Gossypium hirsutum
gtataactaaacaataaaggttctaaaattgcaatatatcca

SEQ ID NO: 22981 - DNA, 25 bp, Gossypium hirsutum
cctgagacgacatgaatcaccaata

SEQ ID NO: 22982 - DNA, 23 bp, Gossypium hirsutum
atttcagatttaattacacctcc

SEQ ID NO: 22983 - DNA, 22 bp, Gossypium hirsutum
tttcagatttaattacccctcc

SEQ ID NO: 22984 - DNA, 24 bp, Gossypium hirsutum
agattcggctcaattcttcactgt

SEQ ID NO: 22985 - DNA, 34 bp, Gossypium hirsutum
gcaaattgaaatcaaatatgaatgtcgattgaga

SEQ ID NO: 22986 - DNA, 20 bp, Gossypium hirsutum
acataagcatatgcatatat

SEQ ID NO: 22987 - DNA, 20 bp, Gossypium hirsutum
acataagcatatgaatatat

SEQ ID NO: 22988 - DNA, 27 bp, Gossypium hirsutum
gcattgtacacagtttttgaacacgaa

SEQ ID NO: 22989 - DNA, 26 bp, Gossypium hirsutum
caaactgatcaagtcattaccggact

SEQ ID NO: 22990 - DNA, 14 bp, Gossypium hirsutum
cagttgcagagtgc

SEQ ID NO: 22991 - DNA, 14 bp, Gossypium hirsutum
cagttgcggagtgc

SEQ ID NO: 22992 - DNA, 21 bp, Gossypium hirsutum
ggtgtagcattttcctgcgtt

SEQ ID NO: 22993 - DNA, 34 bp, Gossypium hirsutum
tgagttggtatttgatacattggtagtgtatttt

SEQ ID NO: 22994 - DNA, 19 bp, Gossypium hirsutum
acacaagcagtcttaagaa

SEQ ID NO: 22995 - DNA, 17 bp, Gossypium hirsutum
acaagcagtgttaagaa

SEQ ID NO: 22996 - DNA, 29 bp, Gossypium hirsutum
cacaagtttaggaggttgataagtatcct

SEQ ID NO: 22997 - DNA, 24 bp, Gossypium hirsutum
catcaggtttacggtcaccaagaa

SEQ ID NO: 22998 - DNA, 14 bp, Gossypium hirsutum
catgcaaaacctcg

SEQ ID NO: 22999 - DNA, 13 bp, Gossypium hirsutum
atgcaagacctcg

SEQ ID NO: 23000 - DNA, 25 bp, Gossypium hirsutum
gcaagatatcctgattggcagacta

SEQ ID NO: 23001 - DNA, 23 bp, Gossypium hirsutum
gacagcctcgtaaatcctttcga

SEQ ID NO: 23002 - DNA, 18 bp, Gossypium hirsutum
tctgtgtatcccaaagta

SEQ ID NO: 23003 - DNA, 19 bp, Gossypium hirsutum
atctgtgtatcccgaagta

SEQ ID NO: 23004 - DNA, 30 bp, Gossypium hirsutum
ttttatgaagatgctggtgaattgaacttg

SEQ ID NO: 23005 - DNA, 24 bp, Gossypium hirsutum
gggaaatgacatcagtcctcatct

SEQ ID NO: 23006 - DNA, 16 bp, Gossypium hirsutum
aagcacctgatcgggt

SEQ ID NO: 23007 - DNA, 16 bp, Gossypium hirsutum
aagcacctaatcgggt

SEQ ID NO: 23008 - DNA, 25 bp, Gossypium hirsutum
tgcccgttcttgttcctattcaaat

SEQ ID NO: 23009 - DNA, 29 bp, Gossypium hirsutum
tgactttgtctaaattgatgagacccaaa

SEQ ID NO: 23010 - DNA, 17 bp, Gossypium hirsutum
aattgagcgggttgagt

SEQ ID NO: 23011 - DNA, 17 bp, Gossypium hirsutum
aattgagcgagttgagt

SEQ ID NO: 23012 - DNA, 29 bp, Gossypium hirsutum
tcttactaaaatcacacacaactggactt

SEQ ID NO: 23013 - DNA, 26 bp, Gossypium hirsutum
cccatggtttttaagttcgagttgtt

SEQ ID NO: 23014 - DNA, 17 bp, Gossypium hirsutum
tttgagcttcgatcatt

SEQ ID NO: 23015 - DNA, 17 bp, Gossypium hirsutum
tttgagctttgatcatt

SEQ ID NO: 23016 - DNA, 27 bp, Gossypium hirsutum
actagtgtcaatgatcacaaacccaat

SEQ ID NO: 23017 - DNA, 34 bp, Gossypium hirsutum
gaaaactatcttgcattagaaaaacctattccaa

SEQ ID NO: 23018 - DNA, 16 bp, Gossypium hirsutum
cctgcaatcactcacc

SEQ ID NO: 23019 - DNA, 15 bp, Gossypium hirsutum
ctgcaatcgctcacc

SEQ ID NO: 23020 - DNA, 25 bp, Gossypium hirsutum
gcatcaatggcctcattagacattt

SEQ ID NO: 23021 - DNA, 25 bp, Gossypium hirsutum
cgaggttggagatagatttgggaaa

SEQ ID NO: 23022 - DNA, 18 bp, Gossypium hirsutum
aatttcccttcatttcca

SEQ ID NO: 23023 - DNA, 19 bp, Gossypium hirsutum
aaatttcccttcttttcca

SEQ ID NO: 23024 - DNA, 25 bp, Gossypium hirsutum
cactgagatcaggaaggacaagatt

SEQ ID NO: 23025 - DNA, 34 bp, Gossypium hirsutum
tgaactaattgcttgttttttcttgttctatgaa

SEQ ID NO: 23026 - DNA, 20 bp, Gossypium hirsutum
cctaactccaatttgtttaa

SEQ ID NO: 23027 - DNA, 19 bp, Gossypium hirsutum
ctaactccaatgtgtttaa

SEQ ID NO: 23028 - DNA, 25 bp, Gossypium hirsutum
cccacataggaaaaggaatgctgaa

SEQ ID NO: 23029 - DNA, 39 bp, Gossypium hirsutum
agctttaataaactatatatgtatccagaccaaaatagg

SEQ ID NO: 23030 - DNA, 23 bp, Gossypium hirsutum
tttacctgatcttaacgtataca

SEQ ID NO: 23031 - DNA, 20 bp, Gossypium hirsutum
acctgatcttaacatataca

SEQ ID NO: 23032 - DNA, 28 bp, Gossypium hirsutum
tcttttcaagctttattgaattgcctcc

SEQ ID NO: 23033 - DNA, 30 bp, Gossypium hirsutum
acaatcgaacttaatctaatcaggtttcgt

SEQ ID NO: 23034 - DNA, 21 bp, Gossypium hirsutum
cattcacttaacatcataaaa

SEQ ID NO: 23035 - DNA, 17 bp, Gossypium hirsutum
cacttaacagcataaaa

SEQ ID NO: 23036 - DNA, 34 bp, Gossypium hirsutum
tgccaatatattaaccttgtattttccttttcct

SEQ ID NO: 23037 - DNA, 38 bp, Gossypium hirsutum
aaataacaacaaacctgattagtttacccttttaattt

SEQ ID NO: 23038 - DNA, 16 bp, Gossypium hirsutum
caggcttctgtcagca

SEQ ID NO: 23039 - DNA, 16 bp, Gossypium hirsutum
caggcttctttcagca

SEQ ID NO: 23040 - DNA, 30 bp, Gossypium hirsutum
gctgaataaatatgaaaatggtcgattgca

SEQ ID NO: 23041 - DNA, 33 bp, Gossypium hirsutum
tgatctatgtgtattaacacaaggtcttacatg

SEQ ID NO: 23042 - DNA, 24 bp, Gossypium hirsutum
aaatgtaaatttttttaaaaattt

SEQ ID NO: 23043 - DNA, 22 bp, Gossypium hirsutum
atgtaaatttttttaaaaaatt

SEQ ID NO: 23044 - DNA, 25 bp, Gossypium hirsutum
cggttttaattgctgcttgttgtga

SEQ ID NO: 23045 - DNA, 38 bp, Gossypium hirsutum
ggttttgtaaatgaaatattttgtttgaaattgcattg

SEQ ID NO: 23046 - DNA, 19 bp, Gossypium hirsutum
caattgaaaaaaaaattgt

SEQ ID NO: 23047 - DNA, 18 bp, Gossypium hirsutum
caattgaaaaaaaattgt

SEQ ID NO: 23048 - DNA, 28 bp, Gossypium hirsutum
gggcctaatttgaacatttagcctaaaa

SEQ ID NO: 23049 - DNA, 20 bp, Gossypium hirsutum
ggtaacggttgctgggtttt

SEQ ID NO: 23050 - DNA, 21 bp, Gossypium hirsutum
aaggtttaatcccttgtttga

SEQ ID NO: 23051 - DNA, 20 bp, Gossypium hirsutum
aggtttaatcccttatttga

SEQ ID NO: 23052 - DNA, 40 bp, Gossypium hirsutum
atttagaaggaaattaaaagagttgataaagtagtatcca

SEQ ID NO: 23053 - DNA, 41 bp, Gossypium hirsutum
agaatagaactataaagaataatgtcacattttgtagatgt

SEQ ID NO: 23054 - DNA, 19 bp, Gossypium hirsutum
aagtaccacattaaatatt

SEQ ID NO: 23055 - DNA, 16 bp, Gossypium hirsutum
taccacattgaatatt

SEQ ID NO: 23056 - DNA, 45 bp, Gossypium hirsutum
ccgatatctattttattattttattatggtacttgtactttcaca

SEQ ID NO: 23057 - DNA, 27 bp, Gossypium hirsutum
cccctactatgttcatggatttgatga

SEQ ID NO: 23058 - DNA, 20 bp, Gossypium hirsutum
cttggatcaatttatggttg

SEQ ID NO: 23059 - DNA, 19 bp, Gossypium hirsutum
ttggatcaatttgtggttg

SEQ ID NO: 23060 - DNA, 16 bp, Gossypium hirsutum
tgcgcgtcgtgatcct

SEQ ID NO: 23061 - DNA, 25 bp, Gossypium hirsutum
ccatgcacagaagagtatgttgaga

SEQ ID NO: 23062 - DNA, 18 bp, Gossypium hirsutum
tacttcaacagagaagat

SEQ ID NO: 23063 - DNA, 15 bp, Gossypium hirsutum
ttcaacggagaagat

SEQ ID NO: 23064 - DNA, 25 bp, Gossypium hirsutum
gaaagctttgtgagattagcatgca

SEQ ID NO: 23065 - DNA, 26 bp, Gossypium hirsutum
ttccgaaagaagtaaaaaccggtact

SEQ ID NO: 23066 - DNA, 18 bp, Gossypium hirsutum
ttcactttcgttgttttt

SEQ ID NO: 23067 - DNA, 19 bp, Gossypium hirsutum
tttcactttcattgttttt

SEQ ID NO: 23068 - DNA, 24 bp, Gossypium hirsutum
gcctagagttagaatcgccttcat

SEQ ID NO: 23069 - DNA, 23 bp, Gossypium hirsutum
aggtgatcccatgttgccataaa

SEQ ID NO: 23070 - DNA, 16 bp, Gossypium hirsutum
actgtaacaggttttc

SEQ ID NO: 23071 - DNA, 16 bp, Gossypium hirsutum
actgtaacaagttttc

SEQ ID NO: 23072 - DNA, 26 bp, Gossypium hirsutum
gaggattgcctactttaaaacaagca

SEQ ID NO: 23073 - DNA, 22 bp, Gossypium hirsutum
aaccatgtgctctgaagaacca

SEQ ID NO: 23074 - DNA, 17 bp, Gossypium hirsutum
catatgacgccaccctg

SEQ ID NO: 23075 - DNA, 16 bp, Gossypium hirsutum
atatgacgccgccctg

SEQ ID NO: 23076 - DNA, 29 bp, Gossypium hirsutum
actctgatttctacaaaaatcacctcgtt

SEQ ID NO: 23077 - DNA, 27 bp, Gossypium hirsutum
actagacgaagccaaatcagaaaatga

SEQ ID NO: 23078 - DNA, 24 bp, Gossypium hirsutum
ctgaaggaatttaatggtagtaca

SEQ ID NO: 23079 - DNA, 21 bp, Gossypium hirsutum
aaggaatttaatggtaataca

SEQ ID NO: 23080 - DNA, 22 bp, Gossypium hirsutum
tgaggacccttttgctgaagtg

SEQ ID NO: 23081 - DNA, 32 bp, Gossypium hirsutum
tcttttccattctttattacaaaacaatgcca

SEQ ID NO: 23082 - DNA, 15 bp, Gossypium hirsutum
cacccaaaattaaat

SEQ ID NO: 23083 - DNA, 15 bp, Gossypium hirsutum
cacccataattaaat

SEQ ID NO: 23084 - DNA, 26 bp, Gossypium hirsutum
acaaaaacgcataaattgcatgacct

SEQ ID NO: 23085 - DNA, 37 bp, Gossypium hirsutum
ttttttattgttttccattgtttaataggtctccatt

SEQ ID NO: 23086 - DNA, 20 bp, Gossypium hirsutum
caagtaaagaccttttaaac

SEQ ID NO: 23087 - DNA, 19 bp, Gossypium hirsutum
aagtaaagacctattaaac

SEQ ID NO: 23088 - DNA, 25 bp, Gossypium hirsutum
caaattggagaggatgacgacaaaa

SEQ ID NO: 23089 - DNA, 32 bp, Gossypium hirsutum
aagttgcaaattagaggatctatcttaaaggg

SEQ ID NO: 23090 - DNA, 18 bp, Gossypium hirsutum
atcctgtagacacattta

SEQ ID NO: 23091 - DNA, 16 bp, Gossypium hirsutum
cctgtagacgcattta

SEQ ID NO: 23092 - DNA, 20 bp, Gossypium hirsutum
agccctgagtgcaatgaact

SEQ ID NO: 23093 - DNA, 22 bp, Gossypium hirsutum
gggtcgacttgggttttgaaaa

SEQ ID NO: 23094 - DNA, 18 bp, Gossypium hirsutum
aaaatgggagtcaccacc

SEQ ID NO: 23095 - DNA, 15 bp, Gossypium hirsutum
atgggagtcgccacc

SEQ ID NO: 23096 - DNA, 20 bp, Gossypium hirsutum
cccgatcacacctcaccaaa

SEQ ID NO: 23097 - DNA, 25 bp, Gossypium hirsutum
tcaccatgttcgaaccagaaatgaa

SEQ ID NO: 23098 - DNA, 20 bp, Gossypium hirsutum
ctgttttgttttttaatttt

SEQ ID NO: 23099 - DNA, 17 bp, Gossypium hirsutum
ttttgtttttgaatttt

SEQ ID NO: 23100 - DNA, 28 bp, Gossypium hirsutum
ttgtctccttacacttacactcttaggt

SEQ ID NO: 23101 - DNA, 34 bp, Gossypium hirsutum
ttggctattaatattattgattggtaggtttcgt

SEQ ID NO: 23102 - DNA, 22 bp, Gossypium hirsutum
cttaaattctcttctaattcca

SEQ ID NO: 23103 - DNA, 23 bp, Gossypium hirsutum
tcttaaattctcttctacttcca

SEQ ID NO: 23104 - DNA, 25 bp, Gossypium hirsutum
gccgagtgaatgaagtgttgaattt

SEQ ID NO: 23105 - DNA, 25 bp, Gossypium hirsutum
ggagggtctttggttaattcggtta

SEQ ID NO: 23106 - DNA, 22 bp, Gossypium hirsutum
atgatcaaatcaattaatttaa

SEQ ID NO: 23107 - DNA, 19 bp, Gossypium hirsutum
atcaaatcaattgatttaa

SEQ ID NO: 23108 - DNA, 22 bp, Gossypium hirsutum
aggcatcaataagggcaagcaa

SEQ ID NO: 23109 - DNA, 31 bp, Gossypium hirsutum
cgtttatgatctaagcaatctgttgtctgta

SEQ ID NO: 23110 - DNA, 22 bp, Gossypium hirsutum
atatactttatcacgcgaccaa

SEQ ID NO: 23111 - DNA, 16 bp, Gossypium hirsutum
tttatcgcgcgaccaa

SEQ ID NO: 23112 - DNA, 27 bp, Gossypium hirsutum
tcaacaagcccataatgaaagatcaca

SEQ ID NO: 23113 - DNA, 31 bp, Gossypium hirsutum
gcacaaaaccaaaaatctaaagcaataggtt

SEQ ID NO: 23114 - DNA, 18 bp, Gossypium hirsutum
ctgtaaagaagaaatatc

SEQ ID NO: 23115 - DNA, 19 bp, Gossypium hirsutum
tctgtaaagaataaatatc

SEQ ID NO: 23116 - DNA, 21 bp, Gossypium hirsutum
ctcgatgtctctcccacgttt

SEQ ID NO: 23117 - DNA, 25 bp, Gossypium hirsutum
cgagaaacacattcgtgaaattgca

SEQ ID NO: 23118 - DNA, 16 bp, Gossypium hirsutum
ttccaagcattgctgc

SEQ ID NO: 23119 - DNA, 14 bp, Gossypium hirsutum
ccaagcactgctgc

SEQ ID NO: 23120 - DNA, 23 bp, Gossypium hirsutum
ccttgacaccctcagtctctttt

SEQ ID NO: 23121 - DNA, 27 bp, Gossypium hirsutum
gccacatcaacaaagttaatagacgtt

SEQ ID NO: 23122 - DNA, 20 bp, Gossypium hirsutum
cttgtattgtttgtcaaatc

SEQ ID NO: 23123 - DNA, 20 bp, Gossypium hirsutum
cttgtattgtttatcaaatc

SEQ ID NO: 23124 - DNA, 29 bp, Gossypium hirsutum
gccctccattttatttcttgtttctttca

SEQ ID NO: 23125 - DNA, 29 bp, Gossypium hirsutum
acactacatggtgggaaattacaatcaat

SEQ ID NO: 23126 - DNA, 18 bp, Gossypium hirsutum
cttgtgttttgctttgat

SEQ ID NO: 23127 - DNA, 18 bp, Gossypium hirsutum
cttgtgtttagctttgat

SEQ ID NO: 23128 - DNA, 20 bp, Gossypium hirsutum
gagtcggaggaaagcaagga

SEQ ID NO: 23129 - DNA, 26 bp, Gossypium hirsutum
ccttttaagatgaaagtggcggtaag

SEQ ID NO: 23130 - DNA, 18 bp, Gossypium hirsutum
cccgttctttcttctcat

SEQ ID NO: 23131 - DNA, 17 bp, Gossypium hirsutum
ccgttctttctgctcat

SEQ ID NO: 23132 - DNA, 29 bp, Gossypium hirsutum
gctgtattagatattgagatcagcagagg

SEQ ID NO: 23133 - DNA, 25 bp, Gossypium hirsutum
tccatttcttgtttggttgctctct

SEQ ID NO: 23134 - DNA, 18 bp, Gossypium hirsutum
caattgctcaaataagat

SEQ ID NO: 23135 - DNA, 17 bp, Gossypium hirsutum
aattgctcaaacaagat

SEQ ID NO: 23136 - DNA, 20 bp, Gossypium hirsutum
cagtcgtgggattccaacct

SEQ ID NO: 23137 - DNA, 21 bp, Gossypium hirsutum
gccgcttcaaatcacatacga

SEQ ID NO: 23138 - DNA, 17 bp, Gossypium hirsutum
ctctctatcggatattc

SEQ ID NO: 23139 - DNA, 17 bp, Gossypium hirsutum
ctctctatcagatattc

SEQ ID NO: 23140 - DNA, 25 bp, Gossypium hirsutum
ggttaggtcttcaatggagcctttt

SEQ ID NO: 23141 - DNA, 25 bp, Gossypium hirsutum
gctagagatagccatggtagatgga

SEQ ID NO: 23142 - DNA, 17 bp, Gossypium hirsutum
acatttcccagtattgc

SEQ ID NO: 23143 - DNA, 16 bp, Gossypium hirsutum
catttcccaatattgc

SEQ ID NO: 23144 - DNA, 31 bp, Gossypium hirsutum
ccaccctttagatcaaattagtttaagtcca

SEQ ID NO: 23145 - DNA, 32 bp, Gossypium hirsutum
aaaacttgaagcatatggcatcgtaaataaaa

SEQ ID NO: 23146 - DNA, 18 bp, Gossypium hirsutum
ctcagttttggcgagtca

SEQ ID NO: 23147 - DNA, 18 bp, Gossypium hirsutum
ctcagttttggccagtca

SEQ ID NO: 23148 - DNA, 26 bp, Gossypium hirsutum
cttccttcttcatctttctgctccat

SEQ ID NO: 23149 - DNA, 23 bp, Gossypium hirsutum
catgccactaacttccactacct

SEQ ID NO: 23150 - DNA, 18 bp, Gossypium hirsutum
cttatgtggtttttaacc

SEQ ID NO: 23151 - DNA, 18 bp, Gossypium hirsutum
cttatgtggttgttaacc

SEQ ID NO: 23152 - DNA, 34 bp, Gossypium hirsutum
gtatcaaatagctatagaaccatgaagttaaggt

SEQ ID NO: 23153 - DNA, 25 bp, Gossypium hirsutum
ctcgtatcgagtgttttgcaaatgt

SEQ ID NO: 23154 - DNA, 17 bp, Gossypium hirsutum
acctcctgtctatctta

SEQ ID NO: 23155 - DNA, 20 bp, Gossypium hirsutum
tagacctcctatctatctta

SEQ ID NO: 23156 - DNA, 28 bp, Gossypium hirsutum
ccttcatgatactaagtttccaccaaca

SEQ ID NO: 23157 - DNA, 25 bp, Gossypium hirsutum
acagggtcgtatgtctgttactgaa

SEQ ID NO: 23158 - DNA, 17 bp, Gossypium hirsutum
ctcaatcttagaaattc

SEQ ID NO: 23159 - DNA, 16 bp, Gossypium hirsutum
tcaatcttacaaattc

SEQ ID NO: 23160 - DNA, 25 bp, Gossypium hirsutum
cgatacacattcacggacatactga

SEQ ID NO: 23161 - DNA, 24 bp, Gossypium hirsutum
cgaataagcttcggagaagaggaa

SEQ ID NO: 23162 - DNA, 17 bp, Gossypium hirsutum
cactttacccgtttcat

SEQ ID NO: 23163 - DNA, 17 bp, Gossypium hirsutum
cactttacccatttcat

SEQ ID NO: 23164 - DNA, 40 bp, Gossypium hirsutum
gcaatcttttgaaataaataaaaaaacgaatagaatttgg

SEQ ID NO: 23165 - DNA, 28 bp, Gossypium hirsutum
tgacagcctttcaaagaaaagagtctta

SEQ ID NO: 23166 - DNA, 24 bp, Gossypium hirsutum
tttatgaaggaaataaaaacttaa

SEQ ID NO: 23167 - DNA, 20 bp, Gossypium hirsutum
tgaaggaaataaaaatttaa

SEQ ID NO: 23168 - DNA, 28 bp, Gossypium hirsutum
gggagtaatgatatggacgcttttattg

SEQ ID NO: 23169 - DNA, 33 bp, Gossypium hirsutum
cctatacattctctaacattatctgtgcattga

SEQ ID NO: 23170 - DNA, 16 bp, Gossypium hirsutum
acctgagtgctgctca

SEQ ID NO: 23171 - DNA, 16 bp, Gossypium hirsutum
acctgagtactgctca

SEQ ID NO: 23172 - DNA, 20 bp, Gossypium hirsutum
gctctcgtggacaacaagca

SEQ ID NO: 23173 - DNA, 53 bp, Gossypium hirsutum
ggacccttctcttatttctaatataaaataaataaattagttaaattaagttg

SEQ ID NO: 23174 - DNA, 17 bp, Gossypium hirsutum
atcgaactgcacgactt

SEQ ID NO: 23175 - DNA, 20 bp, Gossypium hirsutum
ataatcgaactacacgactt

SEQ ID NO: 23176 - DNA, 32 bp, Gossypium hirsutum
agctttacaggttatgttgattatggattcaa

SEQ ID NO: 23177 - DNA, 25 bp, Gossypium hirsutum
gtcaaggaccaacttcgagaactat

SEQ ID NO: 23178 - DNA, 23 bp, Gossypium hirsutum
cttgaagaaaatatctattaaca

SEQ ID NO: 23179 - DNA, 23 bp, Gossypium hirsutum
cttgaagaaaatatctgttaaca

SEQ ID NO: 23180 - DNA, 31 bp, Gossypium hirsutum
tggttgataaaattttggctaaagaaaacga

SEQ ID NO: 23181 - DNA, 38 bp, Gossypium hirsutum
ttttctttctttcaagtaaagataaagatggatttgtc

SEQ ID NO: 23182 - DNA, 20 bp, Gossypium hirsutum
atctttgacttgaatcaata

SEQ ID NO: 23183 - DNA, 20 bp, Gossypium hirsutum
atctttgacttgactcaata

SEQ ID NO: 23184 - DNA, 45 bp, Gossypium hirsutum
ttttattcaacaaaagtatatttaaaatattagttggcaaaatcg

SEQ ID NO: 23185 - DNA, 24 bp, Gossypium hirsutum
gaagatgtaccaaaggcattgcat

SEQ ID NO: 23186 - DNA, 22 bp, Gossypium hirsutum
atttgcaacttgattatgttga

SEQ ID NO: 23187 - DNA, 22 bp, Gossypium hirsutum
atttgcaacttgattttgttga

SEQ ID NO: 23188 - DNA, 41 bp, Gossypium hirsutum
tcatttcaataaagtaagtgttaagacatactagatagaga

SEQ ID NO: 23189 - DNA, 41 bp, Gossypium hirsutum
gtataatgcaaatttaagtacagttatatacaagaaacagg

SEQ ID NO: 23190 - DNA, 17 bp, Gossypium hirsutum
caatactgagaatgttg

SEQ ID NO: 23191 - DNA, 17 bp, Gossypium hirsutum
caatactgaaaatgttg

SEQ ID NO: 23192 - DNA, 28 bp, Gossypium hirsutum
aggcatggtttgataaaaggtaacttct

SEQ ID NO: 23193 - DNA, 34 bp, Gossypium hirsutum
acttattattaacggtcaataactagttgtgctt

SEQ ID NO: 23194 - DNA, 20 bp, Gossypium hirsutum
ctcttttacaatgactattc

SEQ ID NO: 23195 - DNA, 18 bp, Gossypium hirsutum
cttttacaatggctattc

SEQ ID NO: 23196 - DNA, 23 bp, Gossypium hirsutum
gaaaaggaaggatggagcaaagc

SEQ ID NO: 23197 - DNA, 31 bp, Gossypium hirsutum
cttcccaatgtaacttcaatacagaatacct

SEQ ID NO: 23198 - DNA, 17 bp, Gossypium hirsutum
ccaaacacaaagaataa

SEQ ID NO: 23199 - DNA, 17 bp, Gossypium hirsutum
ccaaacacaatgaataa

SEQ ID NO: 23200 - DNA, 39 bp, Gossypium hirsutum
cgtgggactacaaagatgtagaagatttattttaatata

SEQ ID NO: 23201 - DNA, 25 bp, Gossypium hirsutum
cccgctttaggataccatacatgtt

SEQ ID NO: 23202 - DNA, 23 bp, Gossypium hirsutum
ctttttaacttattagaatattc

SEQ ID NO: 23203 - DNA, 24 bp, Gossypium hirsutum
actttttaacttattataatattc

SEQ ID NO: 23204 - DNA, 40 bp, Gossypium hirsutum
ttctgtttttccagttctagttaagtaataactctatttt

SEQ ID NO: 23205 - DNA, 42 bp, Gossypium hirsutum
acaggaagacaaatgtttattgtattatagaaattaacaaaa

SEQ ID NO: 23206 - DNA, 17 bp, Gossypium hirsutum
ctgcattagtaatttac

SEQ ID NO: 23207 - DNA, 17 bp, Gossypium hirsutum
ctgcattagtgatttac

SEQ ID NO: 23208 - DNA, 28 bp, Gossypium hirsutum
cgtgtcatatatagatgacagagacgac

SEQ ID NO: 23209 - DNA, 27 bp, Gossypium hirsutum
caagactttccctaacgaatttaacgt

SEQ ID NO: 23210 - DNA, 22 bp, Gossypium hirsutum
ttttttacttttttaaattttg

SEQ ID NO: 23211 - DNA, 21 bp, Gossypium hirsutum
tttttacttttttaaaatttg

SEQ ID NO: 23212 - DNA, 45 bp, Gossypium hirsutum
gtattaggtcaaattttgttattatttcatttagtttttttggta

SEQ ID NO: 23213 - DNA, 45 bp, Gossypium hirsutum
gagatcagtttagtattactttttaaaattcacttttgagataaa

SEQ ID NO: 23214 - DNA, 22 bp, Gossypium hirsutum
ctcaaaaatattttttaaaaac

SEQ ID NO: 23215 - DNA, 20 bp, Gossypium hirsutum
caaaaatatttttaaaaaac

SEQ ID NO: 23216 - DNA, 39 bp, Gossypium hirsutum
tttagctttaaggtgaaacaggaaaattaattcatattt

SEQ ID NO: 23217 - DNA, 25 bp, Gossypium hirsutum
tccccatgcttattccattgaacat

SEQ ID NO: 23218 - DNA, 20 bp, Gossypium hirsutum
aaaataacagaggagagttg

SEQ ID NO: 23219 - DNA, 20 bp, Gossypium hirsutum
aaaataacagaggacagttg

SEQ ID NO: 23220 - DNA, 19 bp, Gossypium hirsutum
ggtgccactgtcccatctg

SEQ ID NO: 23221 - DNA, 20 bp, Gossypium hirsutum
tgtgaagttgcagccatgga

SEQ ID NO: 23222 - DNA, 15 bp, Gossypium hirsutum
acattcgcgcaagtc

SEQ ID NO: 23223 - DNA, 17 bp, Gossypium hirsutum
atacattcgcgtaagtc

SEQ ID NO: 23224 - DNA, 21 bp, Gossypium hirsutum
ggaaggtacgatggtgaagca

SEQ ID NO: 23225 - DNA, 23 bp, Gossypium hirsutum
ctgtctcggtccataacgtcatt

SEQ ID NO: 23226 - DNA, 19 bp, Gossypium hirsutum
ctagaaatccaaacatctt

SEQ ID NO: 23227 - DNA, 20 bp, Gossypium hirsutum
actagaaatccaaccatctt

SEQ ID NO: 23228 - DNA, 25 bp, Gossypium hirsutum
agctactgcctccatggatatgata

SEQ ID NO: 23229 - DNA, 40 bp, Gossypium hirsutum
actccttcaatctatttaccaaccaaattttaaataaaaa

SEQ ID NO: 23230 - DNA, 21 bp, Gossypium hirsutum
tcacttttctataaaaattat

SEQ ID NO: 23231 - DNA, 21 bp, Gossypium hirsutum
tcacttttctataaaatttat

SEQ ID NO: 23232 - DNA, 30 bp, Gossypium hirsutum
actggttaggatttgaaaacaatggtaact

SEQ ID NO: 23233 - DNA, 25 bp, Gossypium hirsutum
gaaattgacggatgggtgaagaaat

SEQ ID NO: 23234 - DNA, 16 bp, Gossypium hirsutum
ccagacaattttaccc

SEQ ID NO: 23235 - DNA, 16 bp, Gossypium hirsutum
ccagacaattgtaccc

SEQ ID NO: 23236 - DNA, 25 bp, Gossypium hirsutum
tcaacgacggatgtagtagcaaatt

SEQ ID NO: 23237 - DNA, 31 bp, Gossypium hirsutum
gattaatgacatgtatttttagcgtcatgca

SEQ ID NO: 23238 - DNA, 19 bp, Gossypium hirsutum
catgtcatacataatgatc

SEQ ID NO: 23239 - DNA, 18 bp, Gossypium hirsutum
atgtcatacatcatgatc

SEQ ID NO: 23240 - DNA, 46 bp, Gossypium hirsutum
gttttgaagttgattgaccaaaatataaattactaatagtttaatg

SEQ ID NO: 23241 - DNA, 21 bp, Gossypium hirsutum
ccgctacccagatccattgat

SEQ ID NO: 23242 - DNA, 16 bp, Gossypium hirsutum
tgatggtgtcattagc

SEQ ID NO: 23243 - DNA, 18 bp, Gossypium hirsutum
cttgatggtatcattagc

SEQ ID NO: 23244 - DNA, 27 bp, Gossypium hirsutum
cgacaattttgttgctctctaagtcaa

SEQ ID NO: 23245 - DNA, 25 bp, Gossypium hirsutum
tccaggtttctgtttctgtcctcta

SEQ ID NO: 23246 - DNA, 14 bp, Gossypium hirsutum
ttccccgcctcctt

SEQ ID NO: 23247 - DNA, 16 bp, Gossypium hirsutum
tgttcccctcctcctt

SEQ ID NO: 23248 - DNA, 25 bp, Gossypium hirsutum
tgggcatgcattgatagttaaagga

SEQ ID NO: 23249 - DNA, 27 bp, Gossypium hirsutum
ttggtttttctttttggaactttccca

SEQ ID NO: 23250 - DNA, 19 bp, Gossypium hirsutum
acccataaaaaaagaaaag

SEQ ID NO: 23251 - DNA, 17 bp, Gossypium hirsutum
cccataaaaaagaaaag

SEQ ID NO: 23252 - DNA, 20 bp, Gossypium hirsutum
ccacaacccccttggtcttg

SEQ ID NO: 23253 - DNA, 22 bp, Gossypium hirsutum
tcctgggttgttgtccattacc

SEQ ID NO: 23254 - DNA, 22 bp, Gossypium hirsutum
attcagaaacttgtctactaat

SEQ ID NO: 23255 - DNA, 18 bp, Gossypium hirsutum
agaaacttgtccactaat

SEQ ID NO: 23256 - DNA, 45 bp, Gossypium hirsutum
gtggtatacatttttctatttttttcttttacaattttttctctt

SEQ ID NO: 23257 - DNA, 25 bp, Gossypium hirsutum
gtgaatgcaccaatgtttccatctt

SEQ ID NO: 23258 - DNA, 20 bp, Gossypium hirsutum
attcatgaacctgatgataa

SEQ ID NO: 23259 - DNA, 17 bp, Gossypium hirsutum
catgaaccggatgataa

SEQ ID NO: 23260 - DNA, 20 bp, Gossypium hirsutum
agtgtcggtccaccaaaagg

SEQ ID NO: 23261 - DNA, 34 bp, Gossypium hirsutum
gctatgaaattcaaaactagaggtccttatatga

SEQ ID NO: 23262 - DNA, 20 bp, Gossypium hirsutum
aatttagtcctttttttttc

SEQ ID NO: 23263 - DNA, 19 bp, Gossypium hirsutum
aatttagtccttttttttc

SEQ ID NO: 23264 - DNA, 25 bp, Gossypium hirsutum
tttctctctcctagggtttccatgt

SEQ ID NO: 23265 - DNA, 27 bp, Gossypium hirsutum
caagacaccacaagaaggttattcaaa

SEQ ID NO: 23266 - DNA, 23 bp, Gossypium hirsutum
ctaatacgatataaaccgaagtc

SEQ ID NO: 23267 - DNA, 17 bp, Gossypium hirsutum
cgatataagccgaagtc

SEQ ID NO: 23268 - DNA, 25 bp, Gossypium hirsutum
gcccactttcctttttaagccattg

SEQ ID NO: 23269 - DNA, 31 bp, Gossypium hirsutum
ctcactaccatagtaataattgacccatgtt

SEQ ID NO: 23270 - DNA, 18 bp, Gossypium hirsutum
aaatgccaaaaacaaaca

SEQ ID NO: 23271 - DNA, 16 bp, Gossypium hirsutum
atgccaaagacaaaca

SEQ ID NO: 23272 - DNA, 27 bp, Gossypium hirsutum
ttgttccagctcacaaactatagtgtt

SEQ ID NO: 23273 - DNA, 30 bp, Gossypium hirsutum
acccttaatacctttggttcatactttcat

SEQ ID NO: 23274 - DNA, 17 bp, Gossypium hirsutum
cagaattggctatttgg

SEQ ID NO: 23275 - DNA, 14 bp, Gossypium hirsutum
aattggcaatttgg

SEQ ID NO: 23276 - DNA, 24 bp, Gossypium hirsutum
aagaagagtgttgacccgaaactt

SEQ ID NO: 23277 - DNA, 33 bp, Gossypium hirsutum
gtgtgatttgttgttcaatttgggtattttttt

SEQ ID NO: 23278 - DNA, 22 bp, Gossypium hirsutum
catgagaaaattttatgaattc

SEQ ID NO: 23279 - DNA, 20 bp, Gossypium hirsutum
tgagaaaattttataaattc

SEQ ID NO: 23280 - DNA, 28 bp, Gossypium hirsutum
gcaccattttcctttagtttctgttctt

SEQ ID NO: 23281 - DNA, 26 bp, Gossypium hirsutum
cctagcttggaagacttgagtaatgt

SEQ ID NO: 23282 - DNA, 17 bp, Gossypium hirsutum
ctagcaccaagttccta

SEQ ID NO: 23283 - DNA, 15 bp, Gossypium hirsutum
agcaccaggttccta

SEQ ID NO: 23284 - DNA, 25 bp, Gossypium hirsutum
acatcccccaacacttatttttcgt

SEQ ID NO: 23285 - DNA, 25 bp, Gossypium hirsutum
caggagttgatgccgtaggtaataa

SEQ ID NO: 23286 - DNA, 19 bp, Gossypium hirsutum
cattaaggaacctgagatc

SEQ ID NO: 23287 - DNA, 18 bp, Gossypium hirsutum
attaaggaacctgggatc

SEQ ID NO: 23288 - DNA, 24 bp, Gossypium hirsutum
acaaagagaaacccagtcatccaa

SEQ ID NO: 23289 - DNA, 32 bp, Gossypium hirsutum
ctggatttcttccatttagtgctatttacatt

SEQ ID NO: 23290 - DNA, 14 bp, Gossypium hirsutum
ccccagacactggc

SEQ ID NO: 23291 - DNA, 14 bp, Gossypium hirsutum
ccccaaacactggc

SEQ ID NO: 23292 - DNA, 32 bp, Gossypium hirsutum
acaagatgctgtatatagtatagatcctgtgg

SEQ ID NO: 23293 - DNA, 19 bp, Gossypium hirsutum
gccacgctcaagctcgata

SEQ ID NO: 23294 - DNA, 17 bp, Gossypium hirsutum
atcaagctcgagctgag

SEQ ID NO: 23295 - DNA, 16 bp, Gossypium hirsutum
tcaagctcaagctgag

SEQ ID NO: 23296 - DNA, 29 bp, Gossypium hirsutum
agtagctcgattatatctcaagctaagct

SEQ ID NO: 23297 - DNA, 32 bp, Gossypium hirsutum
gtaacattgttaaagcttcacattaaatccct

SEQ ID NO: 23298 - DNA, 21 bp, Gossypium hirsutum
cagttcagactaaaatatcaa

SEQ ID NO: 23299 - DNA, 21 bp, Gossypium hirsutum
cagttcagactaaattatcaa

SEQ ID NO: 23300 - DNA, 43 bp, Gossypium hirsutum
gtataatgacctatgacatatttaaactgttagtctaattgat

SEQ ID NO: 23301 - DNA, 31 bp, Gossypium hirsutum
tccacaagtaaacttaaaaatttgtcacgtt

SEQ ID NO: 23302 - DNA, 23 bp, Gossypium hirsutum
acaagtgatctatagtagtataa

SEQ ID NO: 23303 - DNA, 21 bp, Gossypium hirsutum
aagtgatctatagcagtataa

SEQ ID NO: 23304 - DNA, 29 bp, Gossypium hirsutum
gtttttagatttcacaagctgagttaggg

SEQ ID NO: 23305 - DNA, 32 bp, Gossypium hirsutum
tgcttgtggaaaaatatatggtaattttggac

SEQ ID NO: 23306 - DNA, 16 bp, Gossypium hirsutum
ttaaccgtcaatgtcg

SEQ ID NO: 23307 - DNA, 17 bp, Gossypium hirsutum
tttaaccgtaaatgtcg

SEQ ID NO: 23308 - DNA, 37 bp, Gossypium hirsutum
aagccattaacgaataaaaaacaatacttaagattca

SEQ ID NO: 23309 - DNA, 48 bp, Gossypium hirsutum
gtacaattataggtaaaatctataaattaaaagtgatacatgttcaat

SEQ ID NO: 23310 - DNA, 23 bp, Gossypium hirsutum
aatccaaaattatctaaaagaaa

SEQ ID NO: 23311 - DNA, 19 bp, Gossypium hirsutum
caaaattatctgaaagaaa

SEQ ID NO: 23312 - DNA, 33 bp, Gossypium hirsutum
cgaataaaggaaaaaattgtgatcttgttcaag

SEQ ID NO: 23313 - DNA, 26 bp, Gossypium hirsutum
attggcatgttttgatgtttccagaa

SEQ ID NO: 23314 - DNA, 17 bp, Gossypium hirsutum
tcagatgccattccaat

SEQ ID NO: 23315 - DNA, 16 bp, Gossypium hirsutum
cagatgccactccaat

SEQ ID NO: 23316 - DNA, 30 bp, Gossypium hirsutum
catatggtgaagaagatattgtggaagtca

SEQ ID NO: 23317 - DNA, 21 bp, Gossypium hirsutum
cgcctgatttccagcaagttg

SEQ ID NO: 23318 - DNA, 15 bp, Gossypium hirsutum
tccacatcaaaggct

SEQ ID NO: 23319 - DNA, 14 bp, Gossypium hirsutum
ccacatcgaaggct

SEQ ID NO: 23320 - DNA, 27 bp, Gossypium hirsutum
cttgtaactgaacacagataccttggt

SEQ ID NO: 23321 - DNA, 24 bp, Gossypium hirsutum
tcggaccacaaatctgagtcaaaa

SEQ ID NO: 23322 - DNA, 21 bp, Gossypium hirsutum
cacacatatcaattcacatac

SEQ ID NO: 23323 - DNA, 20 bp, Gossypium hirsutum
acacatatcaatacacatac

SEQ ID NO: 23324 - DNA, 26 bp, Gossypium hirsutum
acttacgcgatttggtccttttatca

SEQ ID NO: 23325 - DNA, 33 bp, Gossypium hirsutum
ccattatgaaaaaaggaaaaatattagcctcca

SEQ ID NO: 23326 - DNA, 22 bp, Gossypium hirsutum
agggattagttttttgagtaaa

SEQ ID NO: 23327 - DNA, 24 bp, Gossypium hirsutum
aaaagggattagttttttagtaaa

SEQ ID NO: 23328 - DNA, 32 bp, Gossypium hirsutum
gtttaagcacgcttaaatgagttttatcttct

SEQ ID NO: 23329 - DNA, 20 bp, Gossypium hirsutum
tgcaccataaccgactgctt

SEQ ID NO: 23330 - DNA, 17 bp, Gossypium hirsutum
ctcgatctccacctcag

SEQ ID NO: 23331 - DNA, 18 bp, Gossypium hirsutum
tctcgatctcctcctcag

SEQ ID NO: 23332 - DNA, 22 bp, Gossypium hirsutum
tccggtaagggtgaagaatgga

SEQ ID NO: 23333 - DNA, 33 bp, Gossypium hirsutum
accattcaagatctaaacttttccttatccttt

SEQ ID NO: 23334 - DNA, 17 bp, Gossypium hirsutum
actccacctatgtcatc

SEQ ID NO: 23335 - DNA, 16 bp, Gossypium hirsutum
ctccacctttgtcatc

SEQ ID NO: 23336 - DNA, 27 bp, Gossypium hirsutum
ttttaacttggcttgtgtgtgtagttg

SEQ ID NO: 23337 - DNA, 26 bp, Gossypium hirsutum
tgttaaagagtttatgtgggccgtaa

SEQ ID NO: 23338 - DNA, 23 bp, Gossypium hirsutum
ataaatggacatttaagagatat

SEQ ID NO: 23339 - DNA, 19 bp, Gossypium hirsutum
atggacatttaggagatat

SEQ ID NO: 23340 - DNA, 27 bp, Gossypium hirsutum
acttctgttggataatggacacttcag

SEQ ID NO: 23341 - DNA, 28 bp, Gossypium hirsutum
ttttcccgaagactactttcaattgtct

SEQ ID NO: 23342 - DNA, 16 bp, Gossypium hirsutum
aagcacagtaagattt

SEQ ID NO: 23343 - DNA, 16 bp, Gossypium hirsutum
aagcacagtaatattt

SEQ ID NO: 23344 - DNA, 31 bp, Gossypium hirsutum
gtgcatgaaaattatattccatgagtgaagt

SEQ ID NO: 23345 - DNA, 22 bp, Gossypium hirsutum
tcagactttgagcaaccgtgtt

SEQ ID NO: 23346 - DNA, 19 bp, Gossypium hirsutum
cagtgtaagtcaagatgag

SEQ ID NO: 23347 - DNA, 19 bp, Gossypium hirsutum
cagtgtaagtcatgatgag

SEQ ID NO: 23348 - DNA, 23 bp, Gossypium hirsutum
ggtctttttgcgtttgggagaag

SEQ ID NO: 23349 - DNA, 25 bp, Gossypium hirsutum
gctatgcaagtcgtgtaatcatcag

SEQ ID NO: 23350 - DNA, 17 bp, Gossypium hirsutum
ctttgactcggagggaa

SEQ ID NO: 23351 - DNA, 17 bp, Gossypium hirsutum
ctttgactcgaagggaa

SEQ ID NO: 23352 - DNA, 28 bp, Gossypium hirsutum
cacattgccttgtttctttattcgttct

SEQ ID NO: 23353 - DNA, 16 bp, Gossypium hirsutum
ccccgaacccgagacc

SEQ ID NO: 23354 - DNA, 19 bp, Gossypium hirsutum
tcgtgttcgattctggcga

SEQ ID NO: 23355 - DNA, 18 bp, Gossypium hirsutum
cgtgttcgattccggcga

SEQ ID NO: 23356 - DNA, 32 bp, Gossypium hirsutum
gcttgtctggaaaaattttaataagtggtttg

SEQ ID NO: 23357 - DNA, 24 bp, Gossypium hirsutum
aatccaggagtttacttgggtgtg

SEQ ID NO: 23358 - DNA, 14 bp, Gossypium hirsutum
tccccgtaaggcag

SEQ ID NO: 23359 - DNA, 16 bp, Gossypium hirsutum
tttccccataaggcag

SEQ ID NO: 23360 - DNA, 26 bp, Gossypium hirsutum
tctctcatataccccatggcattagt

SEQ ID NO: 23361 - DNA, 39 bp, Gossypium hirsutum
atgtcaacataatgttttttcgtttctaattatccaata

SEQ ID NO: 23362 - DNA, 26 bp, Gossypium hirsutum
acatatctattctatagtataaagat

SEQ ID NO: 23363 - DNA, 26 bp, Gossypium hirsutum
acatatctattctataatataaagat

SEQ ID NO: 23364 - DNA, 40 bp, Gossypium hirsutum
tttattcaaattttctcattttttaaattagacctgacct

SEQ ID NO: 23365 - DNA, 30 bp, Gossypium hirsutum
acataagaggccagatatctttgagtaact

SEQ ID NO: 23366 - DNA, 19 bp, Gossypium hirsutum
caactggtaatgtgaaata

SEQ ID NO: 23367 - DNA, 20 bp, Gossypium hirsutum
acaactggtaatatgaaata

SEQ ID NO: 23368 - DNA, 25 bp, Gossypium hirsutum
gaatctacgcagcttcatcatttgt

SEQ ID NO: 23369 - DNA, 23 bp, Gossypium hirsutum
gcagacggaagagatctttcagt

SEQ ID NO: 23370 - DNA, 19 bp, Gossypium hirsutum
acatgcaagttatgacgca

SEQ ID NO: 23371 - DNA, 17 bp, Gossypium hirsutum
atgcaagttaagacgca

SEQ ID NO: 23372 - DNA, 32 bp, Gossypium hirsutum
gagtgattctccttcatttagtttaactgtga

SEQ ID NO: 23373 - DNA, 33 bp, Gossypium hirsutum
gattggtgtttatagtcttaactagaggtgatc

SEQ ID NO: 23374 - DNA, 16 bp, Gossypium hirsutum
atgagtcgggccggat

SEQ ID NO: 23375 - DNA, 16 bp, Gossypium hirsutum
atgagtcgggtcggat

SEQ ID NO: 23376 - DNA, 23 bp, Gossypium hirsutum
ttaaatttttgtttggcccggct

SEQ ID NO: 23377 - DNA, 39 bp, Gossypium hirsutum
gaaaacctgttaacacttaatttaaactacactcataaa

SEQ ID NO: 23378 - DNA, 15 bp, Gossypium hirsutum
cactcaacaaatttt

SEQ ID NO: 23379 - DNA, 14 bp, Gossypium hirsutum
actcaaccaatttt

SEQ ID NO: 23380 - DNA, 23 bp, Gossypium hirsutum
acattgcagaatgggacttggtt

SEQ ID NO: 23381 - DNA, 27 bp, Gossypium hirsutum
agctgtccctgtttattcattgttagg

SEQ ID NO: 23382 - DNA, 16 bp, Gossypium hirsutum
cggcaaaaactccttt

SEQ ID NO: 23383 - DNA, 16 bp, Gossypium hirsutum
cggcaaaaaccccttt

SEQ ID NO: 23384 - DNA, 26 bp, Gossypium hirsutum
ggttggtcacaatacactacgattga

SEQ ID NO: 23385 - DNA, 27 bp, Gossypium hirsutum
ttagcatggcagtaaatggttagacat

SEQ ID NO: 23386 - DNA, 18 bp, Gossypium hirsutum
ctgtatgcagtacattac

SEQ ID NO: 23387 - DNA, 18 bp, Gossypium hirsutum
ctgtatgcagtacgttac

SEQ ID NO: 23388 - DNA, 24 bp, Gossypium hirsutum
tggtgcaagtgtgactagtctttt

SEQ ID NO: 23389 - DNA, 19 bp, Gossypium hirsutum
gccttggtcgcttcaaaca

SEQ ID NO: 23390 - DNA, 16 bp, Gossypium hirsutum
acttttgcaaagattg

SEQ ID NO: 23391 - DNA, 15 bp, Gossypium hirsutum
cttttgcagagattg

SEQ ID NO: 23392 - DNA, 23 bp, Gossypium hirsutum
tcccaccttcatcttagcgatct

SEQ ID NO: 23393 - DNA, 25 bp, Gossypium hirsutum
ctgagtccctgtcaaatacttggaa

SEQ ID NO: 23394 - DNA, 24 bp, Gossypium hirsutum
aaaaataattaaaaagaaaaaaat

SEQ ID NO: 23395 - DNA, 23 bp, Gossypium hirsutum
aaaataattaaatagaaaaaaat

SEQ ID NO: 23396 - DNA, 34 bp, Gossypium hirsutum
ttgattttttgacatgtctcttcttgaatttctt

SEQ ID NO: 23397 - DNA, 27 bp, Gossypium hirsutum
aggttaaggcactatttgggatttgaa

SEQ ID NO: 23398 - DNA, 22 bp, Gossypium hirsutum
attgacaagtgttttcacgtta

SEQ ID NO: 23399 - DNA, 20 bp, Gossypium hirsutum
tgacaagtgttttcatgtta

SEQ ID NO: 23400 - DNA, 31 bp, Gossypium hirsutum
agactcagtgtgagaataattgtcaaattca

SEQ ID NO: 23401 - DNA, 27 bp, Gossypium hirsutum
gccatgcatatgatatgttctcctctt

SEQ ID NO: 23402 - DNA, 20 bp, Gossypium hirsutum
ctcgatacatacctttggac

SEQ ID NO: 23403 - DNA, 18 bp, Gossypium hirsutum
cgatacgtacctttggac

SEQ ID NO: 23404 - DNA, 25 bp, Gossypium hirsutum
cctatgacgatacttaggtgcaagt

SEQ ID NO: 23405 - DNA, 48 bp, Gossypium hirsutum
accatataaataagttacacatataataatttaactaggttactcaac

SEQ ID NO: 23406 - DNA, 20 bp, Gossypium hirsutum
attgttatctcctcaacatt

SEQ ID NO: 23407 - DNA, 16 bp, Gossypium hirsutum
ttatctccgcaacatt

SEQ ID NO: 23408 - DNA, 25 bp, Gossypium hirsutum
ggcaaatggtgttcagactcctaat

SEQ ID NO: 23409 - DNA, 47 bp, Gossypium hirsutum
ccttatgtttatccattaagatatttatttgataattaagctgttaa

SEQ ID NO: 23410 - DNA, 20 bp, Gossypium hirsutum
cttgcttataaggctttatt

SEQ ID NO: 23411 - DNA, 20 bp, Gossypium hirsutum
cttgcttataaggttttatt

SEQ ID NO: 23412 - DNA, 30 bp, Gossypium hirsutum
gcagtctatttatagtcaaacaagcatcct

SEQ ID NO: 23413 - DNA, 32 bp, Gossypium hirsutum
aaccaaccgattctgatataaatatgggaatt

SEQ ID NO: 23414 - DNA, 24 bp, Gossypium hirsutum
cttatgcttctaattattttaaag

SEQ ID NO: 23415 - DNA, 21 bp, Gossypium hirsutum
atgcttctaattaatttaaag

SEQ ID NO: 23416 - DNA, 25 bp, Gossypium hirsutum
tgtttcctgaaatcgacccatgtaa

SEQ ID NO: 23417 - DNA, 25 bp, Gossypium hirsutum
gtggtgtcagagtgtagtacgttaa

SEQ ID NO: 23418 - DNA, 26 bp, Gossypium hirsutum
ttttatttttatttttgagaagttag

SEQ ID NO: 23419 - DNA, 21 bp, Gossypium hirsutum
tttttatttttgagaatttag

SEQ ID NO: 23420 - DNA, 37 bp, Gossypium hirsutum
caaattgtagctttcttttattaagttaccaaaacaa

SEQ ID NO: 23421 - DNA, 17 bp, Gossypium hirsutum
cgaacccgagaccgaca

SEQ ID NO: 23422 - DNA, 15 bp, Gossypium hirsutum
cggagtcgaacacga

SEQ ID NO: 23423 - DNA, 15 bp, Gossypium hirsutum
cggagtcggacacga

SEQ ID NO: 23424 - DNA, 21 bp, Gossypium hirsutum
gactgggcagtgtctggaaaa

SEQ ID NO: 23425 - DNA, 31 bp, Gossypium hirsutum
gggcttcggatatttctataaacatatacca

SEQ ID NO: 23426 - DNA, 17 bp, Gossypium hirsutum
ctccatttcgttttaac

SEQ ID NO: 23427 - DNA, 17 bp, Gossypium hirsutum
ctccatttcattttaac

SEQ ID NO: 23428 - DNA, 29 bp, Gossypium hirsutum
agccaattttgatcatcatatcagtcctt

SEQ ID NO: 23429 - DNA, 29 bp, Gossypium hirsutum
tgtggcacattaaatcatcatttcaaaca

SEQ ID NO: 23430 - DNA, 18 bp, Gossypium hirsutum
tttatacaaccggtcccc

SEQ ID NO: 23431 - DNA, 19 bp, Gossypium hirsutum
atttatacaatcggtcccc

SEQ ID NO: 23432 - DNA, 26 bp, Gossypium hirsutum
ggaaaacaaagggagaagcataagac

SEQ ID NO: 23433 - DNA, 31 bp, Gossypium hirsutum
gaaacattttggaactttgaattctctctct

SEQ ID NO: 23434 - DNA, 22 bp, Gossypium hirsutum
actgataactagactgcatgaa

SEQ ID NO: 23435 - DNA, 21 bp, Gossypium hirsutum
ctgataactagacagcatgaa

SEQ ID NO: 23436 - DNA, 27 bp, Gossypium hirsutum
ggaagaatccaagaattgaacggagtt

SEQ ID NO: 23437 - DNA, 40 bp, Gossypium hirsutum
atgaggatatgtattttgttaggttttgatatatctaagg

SEQ ID NO: 23438 - DNA, 24 bp, Gossypium hirsutum
acaaatactcaaatataggtaaag

SEQ ID NO: 23439 - DNA, 22 bp, Gossypium hirsutum
aaatactcaaatatagataaag

SEQ ID NO: 23440 - DNA, 23 bp, Gossypium hirsutum
ggagagtgtcaaagtgtcagaca

SEQ ID NO: 23441 - DNA, 23 bp, Gossypium hirsutum
gggttggatgttgtcgttttcac

SEQ ID NO: 23442 - DNA, 18 bp, Gossypium hirsutum
aacggcaattttggacac

SEQ ID NO: 23443 - DNA, 16 bp, Gossypium hirsutum
cggcaatttgggacac

SEQ ID NO: 23444 - DNA, 26 bp, Gossypium hirsutum
atgtattgggtgttgtgtttgagaga

SEQ ID NO: 23445 - DNA, 22 bp, Gossypium hirsutum
gtgacggaatcaaggagatgct

SEQ ID NO: 23446 - DNA, 21 bp, Gossypium hirsutum
attacactttggtcctctcaa

SEQ ID NO: 23447 - DNA, 21 bp, Gossypium hirsutum
attacactttggtcttctcaa

SEQ ID NO: 23448 - DNA, 26 bp, Gossypium hirsutum
agtgacggtagtagagctagaaactt

SEQ ID NO: 23449 - DNA, 26 bp, Gossypium hirsutum
actgacaattgggaattggaaaacac

SEQ ID NO: 23450 - DNA, 15 bp, Gossypium hirsutum
ctttgccaaatgcca

SEQ ID NO: 23451 - DNA, 15 bp, Gossypium hirsutum
ctttgcctaatgcca

SEQ ID NO: 23452 - DNA, 29 bp, Gossypium hirsutum
agcttacaaggtagagagactgtcaatat

SEQ ID NO: 23453 - DNA, 27 bp, Gossypium hirsutum
cctcttctttgttcacatttcggattt

SEQ ID NO: 23454 - DNA, 22 bp, Gossypium hirsutum
ctaactaatgtcattgtaaaaa

SEQ ID NO: 23455 - DNA, 19 bp, Gossypium hirsutum
actaatgtcagtgtaaaaa

SEQ ID NO: 23456 - DNA, 35 bp, Gossypium hirsutum
tgtgctagaaagatattttaaagaaaatttgacgt

SEQ ID NO: 23457 - DNA, 23 bp, Gossypium hirsutum
tgagttgcaattccgagggaaat

SEQ ID NO: 23458 - DNA, 18 bp, Gossypium hirsutum
ttttcatcggacatgatg

SEQ ID NO: 23459 - DNA, 18 bp, Gossypium hirsutum
ttttcatcagacatgatg

SEQ ID NO: 23460 - DNA, 26 bp, Gossypium hirsutum
gaaacaaaaagaaacacctgcaatgc

SEQ ID NO: 23461 - DNA, 26 bp, Gossypium hirsutum
ggcttagactaggagtgagtattcga

SEQ ID NO: 23462 - DNA, 21 bp, Gossypium hirsutum
caaattgaattcggttgctaa

SEQ ID NO: 23463 - DNA, 21 bp, Gossypium hirsutum
caaattgaattcgattgctaa

SEQ ID NO: 23464 - DNA, 26 bp, Gossypium hirsutum
gaaattttttgactcgattcggctca

SEQ ID NO: 23465 - DNA, 30 bp, Gossypium hirsutum
actatttgagtttgactcgaacaaaattcg

SEQ ID NO: 23466 - DNA, 18 bp, Gossypium hirsutum
ctcaattcgataattatc

SEQ ID NO: 23467 - DNA, 16 bp, Gossypium hirsutum
caattcggtaattatc

SEQ ID NO: 23468 - DNA, 31 bp, Gossypium hirsutum
gccgtttaagtcaattattattaagctcgaa

SEQ ID NO: 23469 - DNA, 32 bp, Gossypium hirsutum
ccttagacttttaaactttagtccttctgctt

SEQ ID NO: 23470 - DNA, 20 bp, Gossypium hirsutum
aacctttgaatatcaaaata

SEQ ID NO: 23471 - DNA, 18 bp, Gossypium hirsutum
cctttgaatatgaaaata

SEQ ID NO: 23472 - DNA, 33 bp, Gossypium hirsutum
tgaaattcaatctttttgtttttacttcgggat

SEQ ID NO: 23473 - DNA, 27 bp, Gossypium hirsutum
tgatgggctcttatgtgtcaattttca

SEQ ID NO: 23474 - DNA, 18 bp, Gossypium hirsutum
tcaaagtgtcggacacag

SEQ ID NO: 23475 - DNA, 17 bp, Gossypium hirsutum
caaagtgtcagacacag

SEQ ID NO: 23476 - DNA, 29 bp, Gossypium hirsutum
ggtgttcattgttttctttattggtctga

SEQ ID NO: 23477 - DNA, 26 bp, Gossypium hirsutum
caggttttatctgactccttgatgga

SEQ ID NO: 23478 - DNA, 15 bp, Gossypium hirsutum
ctctgcacatcatgc

SEQ ID NO: 23479 - DNA, 15 bp, Gossypium hirsutum
ctctgcacttcatgc

SEQ ID NO: 23480 - DNA, 23 bp, Gossypium hirsutum
atggtttggtggatggaggaaaa

SEQ ID NO: 23481 - DNA, 29 bp, Gossypium hirsutum
tgagacacaataaggtacaaaaagatgct

SEQ ID NO: 23482 - DNA, 20 bp, Gossypium hirsutum
acttagtgaagtgcagtaca

SEQ ID NO: 23483 - DNA, 19 bp, Gossypium hirsutum
cttagtgaagtgcggtaca

SEQ ID NO: 23484 - DNA, 30 bp, Gossypium hirsutum
ttgcatagacacacatacaaaaaacacttt

SEQ ID NO: 23485 - DNA, 28 bp, Gossypium hirsutum
gattcttctgaaaacttgtgggatcttc

SEQ ID NO: 23486 - DNA, 16 bp, Gossypium hirsutum
agcaaagagcataaag

SEQ ID NO: 23487 - DNA, 16 bp, Gossypium hirsutum
agcaaagaacataaag

SEQ ID NO: 23488 - DNA, 25 bp, Gossypium hirsutum
ccttacatcgatgagcccaacaata

SEQ ID NO: 23489 - DNA, 47 bp, Gossypium hirsutum
gaatagttgagtgattattttgtaatttttttatagtctgatgataa

SEQ ID NO: 23490 - DNA, 20 bp, Gossypium hirsutum
catggttaggtgactactaa

SEQ ID NO: 23491 - DNA, 19 bp, Gossypium hirsutum
atggttaggtgattactaa

SEQ ID NO: 23492 - DNA, 19 bp, Gossypium hirsutum
gtgcagcaaggcctaaggt

SEQ ID NO: 23493 - DNA, 44 bp, Gossypium hirsutum
cttagtatgagtttacgtaagaaaaataaatttaatggtgttta

SEQ ID NO: 23494 - DNA, 23 bp, Gossypium hirsutum
ttatactaatcacaaataaattt

SEQ ID NO: 23495 - DNA, 25 bp, Gossypium hirsutum
ttttatactaatcataaataaattt

SEQ ID NO: 23496 - DNA, 44 bp, Gossypium hirsutum
aagtataaagattaatccactaaatatgagtttagatgaaagtt

SEQ ID NO: 23497 - DNA, 41 bp, Gossypium hirsutum
tgtcacgtgttactatcttattatactattagatacgttag

SEQ ID NO: 23498 - DNA, 19 bp, Gossypium hirsutum
aaaagaccaatataatctt

SEQ ID NO: 23499 - DNA, 21 bp, Gossypium hirsutum
agaaaagaccaatatagtctt

SEQ ID NO: 23500 - DNA, 34 bp, Gossypium hirsutum
tgcctctagcatcatttttattttcaaattcttt

SEQ ID NO: 23501 - DNA, 24 bp, Gossypium hirsutum
gcacttgtgagtaagaccacgaaa

SEQ ID NO: 23502 - DNA, 17 bp, Gossypium hirsutum
ccaacactgaataacag

SEQ ID NO: 23503 - DNA, 17 bp, Gossypium hirsutum
ccaacactgactaacag

SEQ ID NO: 23504 - DNA, 21 bp, Gossypium hirsutum
aactgagctatccccgcaatt

SEQ ID NO: 23505 - DNA, 24 bp, Gossypium hirsutum
cttgttggatggttgtggtcattt

SEQ ID NO: 23506 - DNA, 17 bp, Gossypium hirsutum
caggtcagttttagtcg

SEQ ID NO: 23507 - DNA, 17 bp, Gossypium hirsutum
caggtcaattttagtcg

SEQ ID NO: 23508 - DNA, 23 bp, Gossypium hirsutum
aacaattctccctcccaccaaaa

SEQ ID NO: 23509 - DNA, 31 bp, Gossypium hirsutum
attgttttggttatgctttggttatttcact

SEQ ID NO: 23510 - DNA, 25 bp, Gossypium hirsutum
aatattcaaataagaataacaaaat

SEQ ID NO: 23511 - DNA, 19 bp, Gossypium hirsutum
caaataagaacaacaaaat

SEQ ID NO: 23512 - DNA, 32 bp, Gossypium hirsutum
gcaaatgcctctaaaacaatggtaaaattaac

SEQ ID NO: 23513 - DNA, 28 bp, Gossypium hirsutum
ggtatcttacccacttgtatcacattgg

SEQ ID NO: 23514 - DNA, 16 bp, Gossypium hirsutum
ttggagatcgaatcta

SEQ ID NO: 23515 - DNA, 16 bp, Gossypium hirsutum
ttggagatccaatcta

SEQ ID NO: 23516 - DNA, 24 bp, Gossypium hirsutum
tgtggagttctgggttttcttgtc

SEQ ID NO: 23517 - DNA, 25 bp, Gossypium hirsutum
ggccgaaagtgataatgctcttctt

SEQ ID NO: 23518 - DNA, 14 bp, Gossypium hirsutum
ccgctgcccaacca

SEQ ID NO: 23519 - DNA, 13 bp, Gossypium hirsutum
cgctgcacaacca

SEQ ID NO: 23520 - DNA, 25 bp, Gossypium hirsutum
gagttggtgaattaatcgcagcttt

SEQ ID NO: 23521 - DNA, 27 bp, Gossypium hirsutum
gcagacccaagttttaatgaggattca

SEQ ID NO: 23522 - DNA, 20 bp, Gossypium hirsutum
catacgattcaaagattata

SEQ ID NO: 23523 - DNA, 20 bp, Gossypium hirsutum
catacgattcaaatattata

SEQ ID NO: 23524 - DNA, 41 bp, Gossypium hirsutum; identical to SEQ ID NO: 18592

SEQ ID NO: 23525 - DNA, 33 bp, Gossypium hirsutum
actataaattacaaattccttacccgattcagg

SEQ ID NO: 23526 - DNA, 20 bp, Gossypium hirsutum
ttgtactaataccagagctt

SEQ ID NO: 23527 - DNA, 20 bp, Gossypium hirsutum
ttgtactaataccggagctt

SEQ ID NO: 23528 - DNA, 28 bp, Gossypium hirsutum
gtcagaacagttttgatcagttgaaagt

SEQ ID NO: 23529 - DNA, 28 bp, Gossypium hirsutum
ggtttagccttcatgattgacctatagt

SEQ ID NO: 23530 - DNA, 17 bp, Gossypium hirsutum
catggagcttataggtg

SEQ ID NO: 23531 - DNA, 17 bp, Gossypium hirsutum
catggagcttgtaggtg

SEQ ID NO: 23532 - DNA, 25 bp, Gossypium hirsutum
ctctcaaatagcagtccaggaaagt

SEQ ID NO: 23533 - DNA, 37 bp, Gossypium hirsutum
agaaagaaatttgtttttttaggttaaactgagttga

SEQ ID NO: 23534 - DNA, 24 bp, Gossypium hirsutum
ctacactaactatttttattaatg

SEQ ID NO: 23535 - DNA, 21 bp, Gossypium hirsutum
cactaactatttctattaatg

SEQ ID NO: 23536 - DNA, 27 bp, Gossypium hirsutum
gttttaattgcagtctgtaccatgtgt

SEQ ID NO: 23537 - DNA, 21 bp, Gossypium hirsutum
agccaaagttgctccaagtgt

SEQ ID NO: 23538 - DNA, 19 bp, Gossypium hirsutum
atttatccatgttcttttg

SEQ ID NO: 23539 - DNA, 15 bp, Gossypium hirsutum
atccatgtgcttttg

SEQ ID NO: 23540 - DNA, 25 bp, Gossypium hirsutum
ggtgttgctttccttggtacatttt

SEQ ID NO: 23541 - DNA, 45 bp, Gossypium hirsutum
acaaagatttaaataaaatatattctgcagtcattttgatagatt

SEQ ID NO: 23542 - DNA, 19 bp, Gossypium hirsutum
cagcacaatattcgatatt

SEQ ID NO: 23543 - DNA, 19 bp, Gossypium hirsutum
cagcacaatatttgatatt

SEQ ID NO: 23544 - DNA, 16 bp, Gossypium hirsutum
aaaggagccgtgccca

SEQ ID NO: 23545 - DNA, 29 bp, Gossypium hirsutum
ggtctgcatattatggcatgaatttcatt

SEQ ID NO: 23546 - DNA, 17 bp, Gossypium hirsutum
acaaccaaaataaattc

SEQ ID NO: 23547 - DNA, 14 bp, Gossypium hirsutum
accaaaacaaattc

SEQ ID NO: 23548 - DNA, 35 bp, Gossypium hirsutum
aaagtgtactaaaataagaaagcagctatacttca

SEQ ID NO: 23549 - DNA, 25 bp, Gossypium hirsutum
gtagcttcttgaagccgatttccta

SEQ ID NO: 23550 - DNA, 16 bp, Gossypium hirsutum
tcagtcagtcaatgaa

SEQ ID NO: 23551 - DNA, 15 bp, Gossypium hirsutum
cagtcagtgaatgaa

SEQ ID NO: 23552 - DNA, 25 bp, Gossypium hirsutum
caggcatagctaagcatacccttta

SEQ ID NO: 23553 - DNA, 28 bp, Gossypium hirsutum
ggtccaacagaaggcgtaaatatatact

SEQ ID NO: 23554 - DNA, 17 bp, Gossypium hirsutum
cccttgtgttgttatta

SEQ ID NO: 23555 - DNA, 17 bp, Gossypium hirsutum
cccttgtgttattatta

SEQ ID NO: 23556 - DNA, 32 bp, Gossypium hirsutum
tgtgttatttatcagtacggagtaatacttgc

SEQ ID NO: 23557 - DNA, 28 bp, Gossypium hirsutum
tgcataaagtaggaaagcaagttagtgt

SEQ ID NO: 23558 - DNA, 25 bp, Gossypium hirsutum
attgatccttttaataatagaggga

SEQ ID NO: 23559 - DNA, 24 bp, Gossypium hirsutum
ttgatccttttaataatagagcga

SEQ ID NO: 23560 - DNA, 32 bp, Gossypium hirsutum
tctctgttacaatttggacttatttgatcctt

SEQ ID NO: 23561 - DNA, 23 bp, Gossypium hirsutum
gtgcaagctcgtggaatttcaaa

SEQ ID NO: 23562 - DNA, 14 bp, Gossypium hirsutum
tcccggctatggtc

SEQ ID NO: 23563 - DNA, 13 bp, Gossypium hirsutum
cccggctgtggtc

SEQ ID NO: 23564 - DNA, 22 bp, Gossypium hirsutum
gattggtgccatggagatttgg

SEQ ID NO: 23565 - DNA, 24 bp, Gossypium hirsutum
tgccttgttaccggtttgattctt

SEQ ID NO: 23566 - DNA, 16 bp, Gossypium hirsutum
attgcctcatgccttg

SEQ ID NO: 23567 - DNA, 14 bp, Gossypium hirsutum
tgcctcgtgccttg

SEQ ID NO: 23568 - DNA, 23 bp, Gossypium hirsutum
caatgggaacgcaactacaagac

SEQ ID NO: 23569 - DNA, 33 bp, Gossypium hirsutum
ggcagaagaaattaattagattgtacatctcac

SEQ ID NO: 23570 - DNA, 16 bp, Gossypium hirsutum
ttgcaactcattaaac

SEQ ID NO: 23571 - DNA, 15 bp, Gossypium hirsutum
tgcaactcgttaaac

SEQ ID NO: 23572 - DNA, 25 bp, Gossypium hirsutum
accgaggaattgcaaaagtaggatt

SEQ ID NO: 23573 - DNA, 30 bp, Gossypium hirsutum
aaaaacaactgctgtaattggttcagttat

SEQ ID NO: 23574 - DNA, 24 bp, Gossypium hirsutum
ctattcagatttaatctggccgta

SEQ ID NO: 23575 - DNA, 24 bp, Gossypium hirsutum
ctattcagatttaatctgaccgta

SEQ ID NO: 23576 - DNA, 25 bp, Gossypium hirsutum
gtagcaggctttagtttctgtgttg

SEQ ID NO: 23577 - DNA, 26 bp, Gossypium hirsutum
gaggcagaaactaaaaagcaaactga

SEQ ID NO: 23578 - DNA, 17 bp, Gossypium hirsutum
acattagacatttaccc

SEQ ID NO: 23579 - DNA, 16 bp, Gossypium hirsutum
acattagacattaccc

SEQ ID NO: 23580 - DNA, 39 bp, Gossypium hirsutum
caaccaataattttaagaaaataccgtaagatttcacta

SEQ ID NO: 23581 - DNA, 22 bp, Gossypium hirsutum
aatgcaggtcattacccttccc

SEQ ID NO: 23582 - DNA, 17 bp, Gossypium hirsutum
cccacaacacacacaca

SEQ ID NO: 23583 - DNA, 16 bp, Gossypium hirsutum
ccacaacacgcacaca

SEQ ID NO: 23584 - DNA, 24 bp, Gossypium hirsutum
cgtcaccaaagctccaaatatgtg

SEQ ID NO: 23585 - DNA, 31 bp, Gossypium hirsutum
gatttaacagcaaaattggtattggtggtat

SEQ ID NO: 23586 - DNA, 18 bp, Gossypium hirsutum
tcgaatgtcactgaatta

SEQ ID NO: 23587 - DNA, 18 bp, Gossypium hirsutum
ttcgaatgtcactaatta

SEQ ID NO: 23588 - DNA, 25 bp, Gossypium hirsutum
cagacggtgtgaatagagaagatca

SEQ ID NO: 23589 - DNA, 25 bp, Gossypium hirsutum
ccatgtcagaaaaagcgaaaacact

SEQ ID NO: 23590 - DNA, 19 bp, Gossypium hirsutum
tgaagtatcttaatttttg

SEQ ID NO: 23591 - DNA, 17 bp, Gossypium hirsutum
aagtatcttgatttttg

SEQ ID NO: 23592 - DNA, 25 bp, Gossypium hirsutum
tgaagagatgtgtgattgtcgcaaa

SEQ ID NO: 23593 - DNA, 25 bp, Gossypium hirsutum
gcctcatcgaacaagtcttagcatt

SEQ ID NO: 23594 - DNA, 19 bp, Gossypium hirsutum
ataaataagcgcacaggca

SEQ ID NO: 23595 - DNA, 16 bp, Gossypium hirsutum
aataagcgcacgggca

SEQ ID NO: 23596 - DNA, 34 bp, Gossypium hirsutum
tcaattcatcacaagacagaataatttgtcaatg

SEQ ID NO: 23597 - DNA, 34 bp, Gossypium hirsutum
gattcactcgtaataagtgagtgaataaacaaaa

SEQ ID NO: 23598 - DNA, 19 bp, Gossypium hirsutum
aattaatatcgcacatttt

SEQ ID NO: 23599 - DNA, 23 bp, Gossypium hirsutum
tttaaattaatatcacacatttt

SEQ ID NO: 23600 - DNA, 30 bp, Gossypium hirsutum
ccatgttatatacttatttcgaagcctcca

SEQ ID NO: 23601 - DNA, 39 bp, Gossypium hirsutum
ggattcagtaagatgagcggttctatttaatatatttat

SEQ ID NO: 23602 - DNA, 20 bp, Gossypium hirsutum
aagttggaaacagtaggatg

SEQ ID NO: 23603 - DNA, 17 bp, Gossypium hirsutum
ttggaaacggtaggatg

SEQ ID NO: 23604 - DNA, 25 bp, Gossypium hirsutum
accaagatccaaatggtcaatggaa

SEQ ID NO: 23605 - DNA, 21 bp, Gossypium hirsutum
ggcaccggacgaagctttata

SEQ ID NO: 23606 - DNA, 18 bp, Gossypium hirsutum
accagtataacggagttc

SEQ ID NO: 23607 - DNA, 17 bp, Gossypium hirsutum
ccagtataacagagttc

SEQ ID NO: 23608 - DNA, 29 bp, Gossypium hirsutum
aacgtaaatcttattctcacagagctcag

SEQ ID NO: 23609 - DNA, 29 bp, Gossypium hirsutum
tgctatcagaaaactgaacaatacatcgt

SEQ ID NO: 23610 - DNA, 15 bp, Gossypium hirsutum
cctgtcgttcaaagc

SEQ ID NO: 23611 - DNA, 14 bp, Gossypium hirsutum
ctgtcgtgcaaagc

SEQ ID NO: 23612 - DNA, 31 bp, Gossypium hirsutum
tgtcaggattctttatttagtatttggcact

SEQ ID NO: 23613 - DNA, 28 bp, Gossypium hirsutum
gctcaatgtctcacagttagtaaaatgc

SEQ ID NO: 23614 - DNA, 15 bp, Gossypium hirsutum
ttctcggccagggca

SEQ ID NO: 23615 - DNA, 16 bp, Gossypium hirsutum
attctcggctagggca

SEQ ID NO: 23616 - DNA, 29 bp, Gossypium hirsutum
catcgtgaaagagcttttgtaagtatagc

SEQ ID NO: 23617 - DNA, 21 bp, Gossypium hirsutum
cccaaaccatagaccctcgaa

SEQ ID NO: 23618 - DNA, 20 bp, Gossypium hirsutum
attttgaatgtgaaagtggt

SEQ ID NO: 23619 - DNA, 19 bp, Gossypium hirsutum
ttttgaatgtgaaagttgt

SEQ ID NO: 23620 - DNA, 18 bp, Gossypium hirsutum
gttggattgccggttgca

SEQ ID NO: 23621 - DNA, 28 bp, Gossypium hirsutum
tcgtttccagatccaaacctttaattct

SEQ ID NO: 23622 - DNA, 18 bp, Gossypium hirsutum
caagaaaacctgcgttcc

SEQ ID NO: 23623 - DNA, 18 bp, Gossypium hirsutum
caagaaaacctacgttcc

SEQ ID NO: 23624 - DNA, 22 bp, Gossypium hirsutum
ttccatgaaatcccaggcagaa

SEQ ID NO: 23625 - DNA, 40 bp, Gossypium hirsutum
aacaagataacattaattttatgaaatgagaagtgattgt

SEQ ID NO: 23626 - DNA, 17 bp, Gossypium hirsutum
atttcacgatcattttt

SEQ ID NO: 23627 - DNA, 17 bp, Gossypium hirsutum
atttcacaatcattttt

SEQ ID NO: 23628 - DNA, 40 bp, Gossypium hirsutum
tctttaaaagtttcaagagaagagattgtataaaattgtg

SEQ ID NO: 23629 - DNA, 28 bp, Gossypium hirsutum
caaattcgataggtgagtcctttaagct

SEQ ID NO: 23630 - DNA, 17 bp, Gossypium hirsutum
cctttttcaaattttag

SEQ ID NO: 23631 - DNA, 17 bp, Gossypium hirsutum
cctttttcagattttag

SEQ ID NO: 23632 - DNA, 24 bp, Gossypium hirsutum
gatcaagcccgagataggtcaaat

SEQ ID NO: 23633 - DNA, 20 bp, Gossypium hirsutum
cgccgttaccaggttgagta

SEQ ID NO: 23634 - DNA, 16 bp, Gossypium hirsutum
cattcccatgaacctt

SEQ ID NO: 23635 - DNA, 16 bp, Gossypium hirsutum
ccattcccataacctt

SEQ ID NO: 23636 - DNA, 25 bp, Gossypium hirsutum
gttggacccggaaataagataaacg

SEQ ID NO: 23637 - DNA, 25 bp, Gossypium hirsutum
gggaagaaaaacgggccaactataa

SEQ ID NO: 23638 - DNA, 24 bp, Gossypium hirsutum
cagttatatatgtagtatacttgc

SEQ ID NO: 23639 - DNA, 21 bp, Gossypium hirsutum
ttatatatgtaggatacttgc

SEQ ID NO: 23640 - DNA, 25 bp, Gossypium hirsutum
ggtaggagtacacgatgacctaact

SEQ ID NO: 23641 - DNA, 41 bp, Gossypium hirsutum
tcgttatgaaaattgttaatttaactgttaaaagagatgtt

SEQ ID NO: 23642 - DNA, 21 bp, Gossypium hirsutum
ccttacaatagtcattttaaa

SEQ ID NO: 23643 - DNA, 20 bp, Gossypium hirsutum
ccttacaatagtcatttaaa

SEQ ID NO: 23644 - DNA, 28 bp, Gossypium hirsutum
gccacataagttttaacaccaagaatga

SEQ ID NO: 23645 - DNA, 23 bp, Gossypium hirsutum
cacatgatgacatctcccaacca

SEQ ID NO: 23646 - DNA, 23 bp, Gossypium hirsutum
ctcagaactttaatttgggttag

SEQ ID NO: 23647 - DNA, 23 bp, Gossypium hirsutum
ctcagaactttaatttaggttag

SEQ ID NO: 23648 - DNA, 23 bp, Gossypium hirsutum
gctttgtaatggtgtgggttggt

SEQ ID NO: 23649 - DNA, 26 bp, Gossypium hirsutum
cggttagtgtaaaaacagcagtagtg

SEQ ID NO: 23650 - DNA, 17 bp, Gossypium hirsutum
catttagggtggatttg

SEQ ID NO: 23651 - DNA, 16 bp, Gossypium hirsutum
atttagggtgaatttg

SEQ ID NO: 23652 - DNA, 29 bp, Gossypium hirsutum
ccaattctgctaaatagttaacacatcga

SEQ ID NO: 23653 - DNA, 25 bp, Gossypium hirsutum
ggcccaacaaagtcttgtcataaaa

SEQ ID NO: 23654 - DNA, 22 bp, Gossypium hirsutum
aaatggagtaatatacttaaac

SEQ ID NO: 23655 - DNA, 22 bp, Gossypium hirsutum
aaatggagtaatattcttaaac

SEQ ID NO: 23656 - DNA, 34 bp, Gossypium hirsutum
tgaagtgcgaagttagaataccaaatgttatatt

SEQ ID NO: 23657 - DNA, 26 bp, Gossypium hirsutum
gacaaggattacccacactttctaca

SEQ ID NO: 23658 - DNA, 19 bp, Gossypium hirsutum
atgctaggaaagggtatga

SEQ ID NO: 23659 - DNA, 20 bp, Gossypium hirsutum
aatgctaggaaagtgtatga

SEQ ID NO: 23660 - DNA, 24 bp, Gossypium hirsutum
gggatgaccttgagaagcttttct

SEQ ID NO: 23661 - DNA, 25 bp, Gossypium hirsutum
ggtcagtgataggagttcaaaaggt

SEQ ID NO: 23662 - DNA, 19 bp, Gossypium hirsutum
tttggattcgatataaaat

SEQ ID NO: 23663 - DNA, 19 bp, Gossypium hirsutum
tttggattcgatttaaaat

SEQ ID NO: 23664 - DNA, 27 bp, Gossypium hirsutum
cggtttctcaagctatactgatcatca

SEQ ID NO: 23665 - DNA, 23 bp, Gossypium hirsutum
gccgagtcagattgcattttacc

SEQ ID NO: 23666 - DNA, 22 bp, Gossypium hirsutum
ctctttgatctaatgtataatg

SEQ ID NO: 23667 - DNA, 20 bp, Gossypium hirsutum
ctttgatctaatgcataatg

SEQ ID NO: 23668 - DNA, 25 bp, Gossypium hirsutum
tatgtcagaatgaggtacacgtcac

SEQ ID NO: 23669 - DNA, 29 bp, Gossypium hirsutum
gtaaatcggtcaccatatgaatcaaggat

SEQ ID NO: 23670 - DNA, 18 bp, Gossypium hirsutum
cttctttttttgaattct

SEQ ID NO: 23671 - DNA, 19 bp, Gossypium hirsutum
ccttcttttttttaattct

SEQ ID NO: 23672 - DNA, 40 bp, Gossypium hirsutum
tcggaagtatcataaaaataacaagatttagaacttagaa

SEQ ID NO: 23673 - DNA, 28 bp, Gossypium hirsutum
ccatgaacaatgtgtcctctaagagtat

SEQ ID NO: 23674 - DNA, 18 bp, Gossypium hirsutum
ttttatggtagaattttc

SEQ ID NO: 23675 - DNA, 19 bp, Gossypium hirsutum
cttttattgtagaattttc

SEQ ID NO: 23676 - DNA, 54 bp, Gossypium hirsutum
gtttatgaagactatattataacatctatattatttttgtatgaagacgtatat

SEQ ID NO: 23677 - DNA, 16 bp, Gossypium hirsutum
gggatggcacgagccc

SEQ ID NO: 23678 - DNA, 14 bp, Gossypium hirsutum
ctcccccaatatgg

SEQ ID NO: 23679 - DNA, 15 bp, Gossypium hirsutum
atctccccaatatgg

SEQ ID NO: 23680 - DNA, 38 bp, Gossypium hirsutum
tcgataaatattaacagaatcttttttactacccactt

SEQ ID NO: 23681 - DNA, 35 bp, Gossypium hirsutum
gaaaggataatgaaaaatgggtacactaaaaatct

SEQ ID NO: 23682 - DNA, 16 bp, Gossypium hirsutum
actgccaccttatcct

SEQ ID NO: 23683 - DNA, 15 bp, Gossypium hirsutum
ctgccacattatcct

SEQ ID NO: 23684 - DNA, 23 bp, Gossypium hirsutum
ggttgttggagatcctgccttag

SEQ ID NO: 23685 - DNA, 25 bp, Gossypium hirsutum
ccaaagttgagagcatttcgttgaa

SEQ ID NO: 23686 - DNA, 18 bp, Gossypium hirsutum
cttggtaggtgatcgtgt

SEQ ID NO: 23687 - DNA, 17 bp, Gossypium hirsutum
ttggtaggtgatcatgt

SEQ ID NO: 23688 - DNA, 23 bp, Gossypium hirsutum
gcccaagtggtagcataattgtc

SEQ ID NO: 23689 - DNA, 26 bp, Gossypium hirsutum
ggttgatagtccaattctacgccttt

SEQ ID NO: 23690 - DNA, 14 bp, Gossypium hirsutum
ccggatcgaataaa

SEQ ID NO: 23691 - DNA, 14 bp, Gossypium hirsutum
ccggatcggataaa

SEQ ID NO: 23692 - DNA, 25 bp, Gossypium hirsutum
gggttctcgatccaactaatccaat

SEQ ID NO: 23693 - DNA, 17 bp, Gossypium hirsutum
gcctcctccaccacagc

SEQ ID NO: 23694 - DNA, 14 bp, Gossypium hirsutum
actccgacaaagac

SEQ ID NO: 23695 - DNA, 14 bp, Gossypium hirsutum
actccgacaacgac

SEQ ID NO: 23696 - DNA, 20 bp, Gossypium hirsutum
ctctgagttcgctgcagcta

SEQ ID NO: 23697 - DNA, 30 bp, Gossypium hirsutum
acagggaacatttttgtctatagaacttgt

SEQ ID NO: 23698 - DNA, 21 bp, Gossypium hirsutum
taagtagtcgataactttaag

SEQ ID NO: 23699 - DNA, 19 bp, Gossypium hirsutum
agtagtcgataattttaag

SEQ ID NO: 23700 - DNA, 33 bp, Gossypium hirsutum
caatggagctatggtaagattatcaattacagt

SEQ ID NO: 23701 - DNA, 20 bp, Gossypium hirsutum
gccttctggagcctgttcac

SEQ ID NO: 23702 - DNA, 19 bp, Gossypium hirsutum
tcagaggatttaagagcac

SEQ ID NO: 23703 - DNA, 18 bp, Gossypium hirsutum
cagaggattttagagcac

SEQ ID NO: 23704 - DNA, 25 bp, Gossypium hirsutum
gctggaagaactcatcaacaacatt

SEQ ID NO: 23705 - DNA, 25 bp, Gossypium hirsutum
tcgatctttttccgcaattctgact

SEQ ID NO: 23706 - DNA, 19 bp, Gossypium hirsutum
ttccatttttgatatcctg

SEQ ID NO: 23707 - DNA, 16 bp, Gossypium hirsutum
catttttgaaatcctg

SEQ ID NO: 23708 - DNA, 22 bp, Gossypium hirsutum
caccagtaaagccaaggtttcc

SEQ ID NO: 23709 - DNA, 41 bp, Gossypium hirsutum
catttataattactaccttagtccctattcaatgttctaat

SEQ ID NO: 23710 - DNA, 19 bp, Gossypium hirsutum
atatttacggtgtgatttt

SEQ ID NO: 23711 - DNA, 18 bp, Gossypium hirsutum
tatttacggagtgatttt

SEQ ID NO: 23712 - DNA, 27 bp, Gossypium hirsutum
ttgcgagatgaaatgttgcgaatttaa

SEQ ID NO: 23713 - DNA, 25 bp, Gossypium hirsutum
gccgtacggagactgataatcctta

SEQ ID NO: 23714 - DNA, 18 bp, Gossypium hirsutum
cttttcctttcccaaatc

SEQ ID NO: 23715 - DNA, 18 bp, Gossypium hirsutum
cttttcctttaccaaatc

SEQ ID NO: 23716 - DNA, 19 bp, Gossypium hirsutum
cccacacgcaaccctcttt

SEQ ID NO: 23717 - DNA, 25 bp, Gossypium hirsutum
agcaacaatgagttgccagatctta

SEQ ID NO: 23718 - DNA, 19 bp, Gossypium hirsutum
attgctacatattttttgc

SEQ ID NO: 23719 - DNA, 18 bp, Gossypium hirsutum
ttgctacatatattttgc

SEQ ID NO: 23720 - DNA, 25 bp, Gossypium hirsutum
agtgcagtgcgtatgtttctgttat

SEQ ID NO: 23721 - DNA, 31 bp, Gossypium hirsutum
ccctcaattttcacttcctaacatcatatct

SEQ ID NO: 23722 - DNA, 15 bp, Gossypium hirsutum
tttttccgaaaaatg

SEQ ID NO: 23723 - DNA, 16 bp, Gossypium hirsutum
atttttccaaaaaatg

SEQ ID NO: 23724 - DNA, 28 bp, Gossypium hirsutum
tttcttcttgagattgaaaacgaacgtg

SEQ ID NO: 23725 - DNA, 28 bp, Gossypium hirsutum
tgattttggagagttttggacttgagaa

SEQ ID NO: 23726 - DNA, 19 bp, Gossypium hirsutum
agctatgaactaaggatca

SEQ ID NO: 23727 - DNA, 17 bp, Gossypium hirsutum
ctatgaactgaggatca

SEQ ID NO: 23728 - DNA, 26 bp, Gossypium hirsutum
ggttgaatcattggtttttggctttt

SEQ ID NO: 23729 - DNA, 34 bp, Gossypium hirsutum
catactttactattttagcaggtatgtaacgtct

SEQ ID NO: 23730 - DNA, 21 bp, Gossypium hirsutum
caatcaattacatcatatatg

SEQ ID NO: 23731 - DNA, 18 bp, Gossypium hirsutum
tcaattacatcaaatatg

SEQ ID NO: 23732 - DNA, 27 bp, Gossypium hirsutum
ccaacttggataacctacatcagaagt

SEQ ID NO: 23733 - DNA, 33 bp, Gossypium hirsutum
aatctcctagtttcttcaatctcatcattttgt

SEQ ID NO: 23734 - DNA, 21 bp, Gossypium hirsutum
aactaaacattcactttatgc

SEQ ID NO: 23735 - DNA, 19 bp, Gossypium hirsutum
ctaaacattcacgttatgc

SEQ ID NO: 23736 - DNA, 35 bp, Gossypium hirsutum
gggaaaattggcttttaggataaaattttgtattt

SEQ ID NO: 23737 - DNA, 25 bp, Gossypium hirsutum
ggcagcattctggaatttgtaaagc

SEQ ID NO: 23738 - DNA, 15 bp, Gossypium hirsutum
actacacgaaaaact

SEQ ID NO: 23739 - DNA, 16 bp, Gossypium hirsutum
aactacacaaaaaact

SEQ ID NO: 23740 - DNA, 28 bp, Gossypium hirsutum
accacaaatgaaaatgcaatgattctga

SEQ ID NO: 23741 - DNA, 50 bp, Gossypium hirsutum
tcagaattattgtatctgatattctaagtttaatattttcatctatctac

SEQ ID NO: 23742 - DNA, 15 bp, Gossypium hirsutum
tcaccggtcgtctaa

SEQ ID NO: 23743 - DNA, 16 bp, Gossypium hirsutum
ctcaccggttgtctaa

SEQ ID NO: 23744 - DNA, 30 bp, Gossypium hirsutum
ttgtcttttcgtattatgatccgatcatgt

SEQ ID NO: 23745 - DNA, 21 bp, Gossypium hirsutum
gttttgggctagacggatcca

SEQ ID NO: 23746 - DNA, 17 bp, Gossypium hirsutum
ttgaaagtcgagaatgt

SEQ ID NO: 23747 - DNA, 17 bp, Gossypium hirsutum
ttgaaagtcaagaatgt

SEQ ID NO: 23748 - DNA, 23 bp, Gossypium hirsutum
gaatagcagagaaggccgatcag

SEQ ID NO: 23749 - DNA, 25 bp, Gossypium hirsutum
ttggatcttgcttcagtgtaatcgt

SEQ ID NO: 23750 - DNA, 17 bp, Gossypium hirsutum
acttcaatggagagcag

SEQ ID NO: 23751 - DNA, 18 bp, Gossypium hirsutum
cacttcaatgaagagcag

SEQ ID NO: 23752 - DNA, 25 bp, Gossypium hirsutum
agaacaaatcgaagtctggcatctc

SEQ ID NO: 23753 - DNA, 25 bp, Gossypium hirsutum
tgcccacgcttatcttaaatgagtt

SEQ ID NO: 23754 - DNA, 16 bp, Gossypium hirsutum
cacttcactgccatcc

SEQ ID NO: 23755 - DNA, 17 bp, Gossypium hirsutum
acacttcacttccatcc

SEQ ID NO: 23756 - DNA, 31 bp, Gossypium hirsutum
tgccatatcaacctatgcatttaaaatgtac

SEQ ID NO: 23757 - DNA, 25 bp, Gossypium hirsutum
agagattgtgtgagttacggaaacc

SEQ ID NO: 23758 - DNA, 16 bp, Gossypium hirsutum
atggccattacaagcg

SEQ ID NO: 23759 - DNA, 16 bp, Gossypium hirsutum
atggccattaccagcg

SEQ ID NO: 23760 - DNA, 25 bp, Gossypium hirsutum
cggtcgatacgatgtgctgataaaa

SEQ ID NO: 23761 - DNA, 49 bp, Gossypium hirsutum
gaaagagtaaacttattctttttattaaaaaatttatctaattgtaccg

SEQ ID NO: 23762 - DNA, 16 bp, Gossypium hirsutum
acgtgacgtgtcacat

SEQ ID NO: 23763 - DNA, 15 bp, Gossypium hirsutum
cgtgacgtgtcgcat

SEQ ID NO: 23764 - DNA, 26 bp, Gossypium hirsutum
ggtgtaactgacagaataaccacaca

SEQ ID NO: 23765 - DNA, 29 bp, Gossypium hirsutum
acaaaatcactttcagtctctttcccatt

SEQ ID NO: 23766 - DNA, 22 bp, Gossypium hirsutum
aaaccactttctctttgatgta

SEQ ID NO: 23767 - DNA, 23 bp, Gossypium hirsutum
aaaaccactttctcttttatgta

SEQ ID NO: 23768 - DNA, 30 bp, Gossypium hirsutum
ccagtattgggttcactacacaagaaataa

SEQ ID NO: 23769 - DNA, 23 bp, Gossypium hirsutum
cccacaagtgaatcaaacatggt

SEQ ID NO: 23770 - DNA, 17 bp, Gossypium hirsutum
atggactccgctattat

SEQ ID NO: 23771 - DNA, 17 bp, Gossypium hirsutum
atggactccactattat

SEQ ID NO: 23772 - DNA, 21 bp, Gossypium hirsutum
ctctcccacggtggatcattg

SEQ ID NO: 23773 - DNA, 27 bp, Gossypium hirsutum
cttcaatagatgtcaacaacacgagtg

SEQ ID NO: 23774 - DNA, 15 bp, Gossypium hirsutum
acttcgcgtggatca

SEQ ID NO: 23775 - DNA, 15 bp, Gossypium hirsutum
acttcgcatggatca

SEQ ID NO: 23776 - DNA, 21 bp, Gossypium hirsutum
ggccgtccatttctacttgca

SEQ ID NO: 23777 - DNA, 26 bp, Gossypium hirsutum
accaggtaaagttgagcttagactct

SEQ ID NO: 23778 - DNA, 16 bp, Gossypium hirsutum
ccgagaagtgcttatt

SEQ ID NO: 23779 - DNA, 16 bp, Gossypium hirsutum
ccgagaagtgattatt

SEQ ID NO: 23780 - DNA, 20 bp, Gossypium hirsutum
ggttagtactcgggttgcct

SEQ ID NO: 23781 - DNA, 25 bp, Gossypium hirsutum
tccctagactcaaggaaaagacaga

SEQ ID NO: 23782 - DNA, 15 bp, Gossypium hirsutum
caggtaggaaactct

SEQ ID NO: 23783 - DNA, 15 bp, Gossypium hirsutum
caggtagaaaactct

SEQ ID NO: 23784 - DNA, 21 bp, Gossypium hirsutum
aaccccactgatgcattggat

SEQ ID NO: 23785 - DNA, 26 bp, Gossypium hirsutum
acggtttgttaaaggattctccatga

SEQ ID NO: 23786 - DNA, 18 bp, Gossypium hirsutum
catctttctgtaacagcc

SEQ ID NO: 23787 - DNA, 21 bp, Gossypium hirsutum
ttacatctttctataacagcc

SEQ ID NO: 23788 - DNA, 27 bp, Gossypium hirsutum
tctgttggcatttttctatccattcga

SEQ ID NO: 23789 - DNA, 25 bp, Gossypium hirsutum
cgtgaggctgatcctaaagaagtta

SEQ ID NO: 23790 - DNA, 18 bp, Gossypium hirsutum
ttttgtcagcctctcagc

SEQ ID NO: 23791 - DNA, 20 bp, Gossypium hirsutum
atttttgtcaacctctcagc

SEQ ID NO: 23792 - DNA, 25 bp, Gossypium hirsutum
gaggtctctccagacaaaattcctt

SEQ ID NO: 23793 - DNA, 26 bp, Gossypium hirsutum
gatagacgatgataactgtggtgtga

SEQ ID NO: 23794 - DNA, 16 bp, Gossypium hirsutum
acggcgaaattaatta

SEQ ID NO: 23795 - DNA, 16 bp, Gossypium hirsutum
acggcaaaattaatta

SEQ ID NO: 23796 - DNA, 27 bp, Gossypium hirsutum
acacagccacttaagttaacgagaaat

SEQ ID NO: 23797 - DNA, 32 bp, Gossypium hirsutum
acagctttatgtgtttcaaatttgttgtagaa

SEQ ID NO: 23798 - DNA, 18 bp, Gossypium hirsutum
ctctatacattgaagctc

SEQ ID NO: 23799 - DNA, 16 bp, Gossypium hirsutum
ctatacatggaagctc

SEQ ID NO: 23800 - DNA, 37 bp, Gossypium hirsutum
acataaaaacataaacccaaattcgatacttaaagaa

SEQ ID NO: 23801 - DNA, 27 bp, Gossypium hirsutum
cacgaagatctgcatttttttcaaacc

SEQ ID NO: 23802 - DNA, 19 bp, Gossypium hirsutum
cactacaaaccctaatcag

SEQ ID NO: 23803 - DNA, 18 bp, Gossypium hirsutum
actacaaaccataatcag

SEQ ID NO: 23804 - DNA, 25 bp, Gossypium hirsutum
ccaaaacccaaggctaagaaagaat

SEQ ID NO: 23805 - DNA, 25 bp, Gossypium hirsutum
gcagttcaagcctttattctcgaat

SEQ ID NO: 23806 - DNA, 25 bp, Gossypium hirsutum
ttcaaaaaaataaaaaaaaattaat

SEQ ID NO: 23807 - DNA, 24 bp, Gossypium hirsutum
ttcaaaaaaataaaaaaaattaat

SEQ ID NO: 23808 - DNA, 31 bp, Gossypium hirsutum
tcgtactcgaaacttgaatcgaattatttga

SEQ ID NO: 23809 - DNA, 25 bp, Gossypium hirsutum
aggaggccggaattaaattgtgtat

SEQ ID NO: 23810 - DNA, 20 bp, Gossypium hirsutum
ctattaaaatggtgaaatta

SEQ ID NO: 23811 - DNA, 23 bp, Gossypium hirsutum
aaactattaaaatagtgaaatta

SEQ ID NO: 23812 - DNA, 35 bp, Gossypium hirsutum
ttgttttgggagcaaacataaaattaaatgttttt

SEQ ID NO: 23813 - DNA, 19 bp, Gossypium hirsutum
gcgccgactcccctaaaat

SEQ ID NO: 23814 - DNA, 26 bp, Gossypium hirsutum
ttttactattgtaaaaattacaattt

SEQ ID NO: 23815 - DNA, 26 bp, Gossypium hirsutum
ttttactattgtaaaaattataattt

SEQ ID NO: 23816 - DNA, 37 bp, Gossypium hirsutum
cctatgttgtgggttcaaataatagattaattctttt

SEQ ID NO: 23817 - DNA, 29 bp, Gossypium hirsutum
caaaaacaacatctctgctaatcacaact

SEQ ID NO: 23818 - DNA, 15 bp, Gossypium hirsutum
ctggtgtcaaagggt

SEQ ID NO: 23819 - DNA, 15 bp, Gossypium hirsutum
ctggtgtaaaagggt

SEQ ID NO: 23820 - DNA, 30 bp, Gossypium hirsutum
ggaaaattggaaccgagattcattaaatgt

SEQ ID NO: 23821 - DNA, 27 bp, Gossypium hirsutum
tccaacccagatttttgcagaattagt

SEQ ID NO: 23822 - DNA, 21 bp, Gossypium hirsutum
tgaaatctgtgaattgggttg

SEQ ID NO: 23823 - DNA, 19 bp, Gossypium hirsutum
aaatctgtgaagtgggttg

SEQ ID NO: 23824 - DNA, 23 bp, Gossypium hirsutum
ccccccccaaaaaaaagtgaaaa

SEQ ID NO: 23825 - DNA, 29 bp, Gossypium hirsutum
acattaaagccaatcatcttgaggattca

SEQ ID NO: 23826 - DNA, 20 bp, Gossypium hirsutum
tttaaatatgctccaagtcc

SEQ ID NO: 23827 - DNA, 16 bp, Gossypium hirsutum
aatatgctcgaagtcc

SEQ ID NO: 23828 - DNA, 30 bp, Gossypium hirsutum
gagggactaaattccaaatgtacaaagagt

SEQ ID NO: 23829 - DNA, 29 bp, Gossypium hirsutum
gaggtagaaacaagttggaactctagaaa

SEQ ID NO: 23830 - DNA, 22 bp, Gossypium hirsutum
aataataatgactatgaagcct

SEQ ID NO: 23831 - DNA, 21 bp, Gossypium hirsutum
ataataatgagtatgaagcct

SEQ ID NO: 23832 - DNA, 37 bp, Gossypium hirsutum
tgcaattaataactttacttgtaagagagaaaaccta

SEQ ID NO: 23833 - DNA, 25 bp, Gossypium hirsutum
ccccacttaaaggcttcatcaactt

SEQ ID NO: 23834 - DNA, 20 bp, Gossypium hirsutum
ttagtcacctaaagattaat

SEQ ID NO: 23835 - DNA, 20 bp, Gossypium hirsutum
ttagtcacctaaatattaat

SEQ ID NO: 23836 - DNA, 31 bp, Gossypium hirsutum
tgcctagtctgaaaattttaccatatgtgat

SEQ ID NO: 23837 - DNA, 27 bp, Gossypium hirsutum
cgtggctaatagcatcgttttatttgt

SEQ ID NO: 23838 - DNA, 21 bp, Gossypium hirsutum
atctatgtctacaatactatg

SEQ ID NO: 23839 - DNA, 18 bp, Gossypium hirsutum
tatgtctacaaaactatg

SEQ ID NO: 23840 - DNA, 26 bp, Gossypium hirsutum
ccaagaattgtgatacatgcatgcaa

SEQ ID NO: 23841 - DNA, 22 bp, Gossypium hirsutum
gtgtcaggcaaaagcatgttga

SEQ ID NO: 23842 - DNA, 21 bp, Gossypium hirsutum
aaaagcaaatttaacgggaat

SEQ ID NO: 23843 - DNA, 20 bp, Gossypium hirsutum
aaagcaaatttaacggaaat

SEQ ID NO: 23844 - DNA, 35 bp, Gossypium hirsutum
atcgaagggtttagtatcaagaaattatttatgga

SEQ ID NO: 23845 - DNA, 25 bp, Gossypium hirsutum
aatccgaaactcgagtaacaaacca

SEQ ID NO: 23846 - DNA, 22 bp, Gossypium hirsutum
caacatattggtaattaatgag

SEQ ID NO: 23847 - DNA, 22 bp, Gossypium hirsutum
caacatattggtaattgatgag

SEQ ID NO: 23848 - DNA, 25 bp, Gossypium hirsutum
cttgttgaggtacgtcctatgtctt

SEQ ID NO: 23849 - DNA, 26 bp, Gossypium hirsutum
ggtaacctcatcaagtactccacaga

SEQ ID NO: 23850 - DNA, 16 bp, Gossypium hirsutum
tggaacgaggagtggt

SEQ ID NO: 23851 - DNA, 16 bp, Gossypium hirsutum
tggaacgaagagtggt

SEQ ID NO: 23852 - DNA, 25 bp, Gossypium hirsutum
gcttcgaatggtgatgattctggtt

SEQ ID NO: 23853 - DNA, 31 bp, Gossypium hirsutum
gtattcttcacaaatttggttttcgtcacta

SEQ ID NO: 23854 - DNA, 17 bp, Gossypium hirsutum
ttgatgtgacattttaa

SEQ ID NO: 23855 - DNA, 19 bp, Gossypium hirsutum
tgttgatgtgatattttaa

SEQ ID NO: 23856 - DNA, 29 bp, Gossypium hirsutum
tcaagtgcaattgttattttgtcaacact

SEQ ID NO: 23857 - DNA, 29 bp, Gossypium hirsutum
gacgaagagattttgttttttggaaggtt

SEQ ID NO: 23858 - DNA, 22 bp, Gossypium hirsutum
aaatacaattgaaacgataagg

SEQ ID NO: 23859 - DNA, 20 bp, Gossypium hirsutum
atacaattgaaaggataagg

SEQ ID NO: 23860 - DNA, 30 bp, Gossypium hirsutum
ggagagaatgaaattatttgaaatcgagct

SEQ ID NO: 23861 - DNA, 29 bp, Gossypium hirsutum
accaaacacaaagaaaaacaatagaagca

SEQ ID NO: 23862 - DNA, 21 bp, Gossypium hirsutum
aacaactagaaaggtttagtg

SEQ ID NO: 23863 - DNA, 21 bp, Gossypium hirsutum
aacaactagaaatgtttagtg

SEQ ID NO: 23864 - DNA, 26 bp, Gossypium hirsutum
ccaaaaaccgttattacaccaaacca

SEQ ID NO: 23865 - DNA, 25 bp, Gossypium hirsutum
gttgcttcagaattgcttccacatt

SEQ ID NO: 23866 - DNA, 23 bp, Gossypium hirsutum
atttttatcctttcattgacctc

SEQ ID NO: 23867 - DNA, 16 bp, Gossypium hirsutum
tcctttcgttgacctc

SEQ ID NO: 23868 - DNA, 26 bp, Gossypium hirsutum
agaacaatttaatttcggccccctaa

SEQ ID NO: 23869 - DNA, 23 bp, Gossypium hirsutum
agacatcaagagtcagcgtcaac

SEQ ID NO: 23870 - DNA, 15 bp, Gossypium hirsutum
ctcccgacggagtgg

SEQ ID NO: 23871 - DNA, 15 bp, Gossypium hirsutum
ctcccgaccgagtgg

SEQ ID NO: 23872 - DNA, 31 bp, Gossypium hirsutum
gcgcagagactgtgacataaatatataaaaa

SEQ ID NO: 23873 - DNA, 25 bp, Gossypium hirsutum
agtcgcgtttggtgtagatattgaa

SEQ ID NO: 23874 - DNA, 20 bp, Gossypium hirsutum
ctatggataattcaagtttc

SEQ ID NO: 23875 - DNA, 18 bp, Gossypium hirsutum
atggataattcaggtttc

SEQ ID NO: 23876 - DNA, 21 bp, Gossypium hirsutum
ggcgtcgttgaaagctttagc

SEQ ID NO: 23877 - DNA, 33 bp, Gossypium hirsutum
gttataaaatatgcaacatactaatgtcacggg

SEQ ID NO: 23878 - DNA, 20 bp, Gossypium hirsutum
acttaagactacgtggtttg

SEQ ID NO: 23879 - DNA, 20 bp, Gossypium hirsutum
acttaagactacatggtttg

SEQ ID NO: 23880 - DNA, 22 bp, Gossypium hirsutum
gctgacttgggcagatttgaag

SEQ ID NO: 23881 - DNA, 28 bp, Gossypium hirsutum
gttgcaaggcaaatttgattcaaaactt

SEQ ID NO: 23882 - DNA, 15 bp, Gossypium hirsutum
cgatcaacgagcttc

SEQ ID NO: 23883 - DNA, 15 bp, Gossypium hirsutum
cgatcaacgagtttc

SEQ ID NO: 23884 - DNA, 25 bp, Gossypium hirsutum
ctatgcagccaattctttcaatggt

SEQ ID NO: 23885 - DNA, 21 bp, Gossypium hirsutum
tcctgcaactctcctcttcct

SEQ ID NO: 23886 - DNA, 20 bp, Gossypium hirsutum
ccaaaatctccttccttcaa

SEQ ID NO: 23887 - DNA, 20 bp, Gossypium hirsutum
ccaaaatctcctttcttcaa

SEQ ID NO: 23888 - DNA, 21 bp, Gossypium hirsutum
gctctggccatggatgagatg

SEQ ID NO: 23889 - DNA, 22 bp, Gossypium hirsutum
gtgtgccaatggtcatgacttc

SEQ ID NO: 23890 - DNA, 18 bp, Gossypium hirsutum
cacacgaaatgggagata

SEQ ID NO: 23891 - DNA, 18 bp, Gossypium hirsutum
cacacgaaataggagata

SEQ ID NO: 23892 - DNA, 27 bp, Gossypium hirsutum
acaaagattggccatggaagaataagt

SEQ ID NO: 23893 - DNA, 24 bp, Gossypium hirsutum
agtgcgaagttttctatggatgct

SEQ ID NO: 23894 - DNA, 16 bp, Gossypium hirsutum
ctttgtaggaattctg

SEQ ID NO: 23895 - DNA, 15 bp, Gossypium hirsutum
tttgtagcaattctg

SEQ ID NO: 23896 - DNA, 27 bp, Gossypium hirsutum
agatgttttgaagattcacccctcttt

SEQ ID NO: 23897 - DNA, 31 bp, Gossypium hirsutum
gtacctaatataagcttgttggtatgggttt

SEQ ID NO: 23898 - DNA, 25 bp, Gossypium hirsutum
tgctactactattatttaaagttat

SEQ ID NO: 23899 - DNA, 23 bp, Gossypium hirsutum
ctactactattatttaaaattat

SEQ ID NO: 23900 - DNA, 29 bp, Gossypium hirsutum
tcccatttcgtctatgtttctctttttct

SEQ ID NO: 23901 - DNA, 48 bp, Gossypium hirsutum
tctcattattaatttaatcttttagattctactaataacacgacattt

SEQ ID NO: 23902 - DNA, 23 bp, Gossypium hirsutum
tccgaatttttaaatacggctta

SEQ ID NO: 23903 - DNA, 22 bp, Gossypium hirsutum
ccgaatttttaaatacagctta

SEQ ID NO: 23904 - DNA, 24 bp, Gossypium hirsutum
tcgagcccgcaccaaataataatt

SEQ ID NO: 23905 - DNA, 24 bp, Gossypium hirsutum
ctcatggcagggacaaataaagtc

SEQ ID NO: 23906 - DNA, 20 bp, Gossypium hirsutum
aaaggaaactgctatagaaa

SEQ ID NO: 23907 - DNA, 20 bp, Gossypium hirsutum
aaaggaaactgctttagaaa

SEQ ID NO: 23908 - DNA, 26 bp, Gossypium hirsutum
ctgaagatccttctccatttccaaga

SEQ ID NO: 23909 - DNA, 24 bp, Gossypium hirsutum
cgtcctttaaagaacctccaagct

SEQ ID NO: 23910 - DNA, 17 bp, Gossypium hirsutum
aagtattgcagaaagtt

SEQ ID NO: 23911 - DNA, 17 bp, Gossypium hirsutum
aagtattgcaaaaagtt

SEQ ID NO: 23912 - DNA, 25 bp, Gossypium hirsutum
gaatcttctagtgctaagcgagtga

SEQ ID NO: 23913 - DNA, 27 bp, Gossypium hirsutum
ggcacaagcaattgatttgataagaga

SEQ ID NO: 23914 - DNA, 19 bp, Gossypium hirsutum
actaacaaggatgtccacc

SEQ ID NO: 23915 - DNA, 20 bp, Gossypium hirsutum
aactaacaaggatctccacc

SEQ ID NO: 23916 - DNA, 24 bp, Gossypium hirsutum
ccccacgtgcattcaaactattaa

SEQ ID NO: 23917 - DNA, 29 bp, Gossypium hirsutum
tgctgaaattccaaatatctctctgacaa

SEQ ID NO: 23918 - DNA, 21 bp, Gossypium hirsutum
aaagagtgaagatagcatcat

SEQ ID NO: 23919 - DNA, 17 bp, Gossypium hirsutum
agtgaagatggcatcat

SEQ ID NO: 23920 - DNA, 31 bp, Gossypium hirsutum
gggccttagaatagtaaaatatcaagttcct

SEQ ID NO: 23921 - DNA, 43 bp, Gossypium hirsutum
actacaataaatgtgaaattgaattttgttcaataaaatcttc

SEQ ID NO: 23922 - DNA, 17 bp, Gossypium hirsutum
tcgtgaatagaataaag

SEQ ID NO: 23923 - DNA, 17 bp, Gossypium hirsutum
tcgtgaataaaataaag

SEQ ID NO: 23924 - DNA, 32 bp, Gossypium hirsutum
cttgctttaatacacgtatttggaggattttt

SEQ ID NO: 23925 - DNA, 28 bp, Gossypium hirsutum
cagtagtcctttaatagtccccttttgg

SEQ ID NO: 23926 - DNA, 20 bp, Gossypium hirsutum
ctcgatattagtgaatatac

SEQ ID NO: 23927 - DNA, 20 bp, Gossypium hirsutum
ctcgatattagtaaatatac

SEQ ID NO: 23928 - DNA, 25 bp, Gossypium hirsutum
gccatcctttaatagcagactctct

SEQ ID NO: 23929 - DNA, 27 bp, Gossypium hirsutum
ctgcatcacatgttgaaaagaatacca

SEQ ID NO: 23930 - DNA, 24 bp, Gossypium hirsutum
agcataggaaatagatattataaa

SEQ ID NO: 23931 - DNA, 22 bp, Gossypium hirsutum
cataggaaatagatgttataaa

SEQ ID NO: 23932 - DNA, 23 bp, Gossypium hirsutum
tgcttggttcctgaaagttagct

SEQ ID NO: 23933 - DNA, 31 bp, Gossypium hirsutum
aaagatgaaaagaaaacaatgttgactggaa

SEQ ID NO: 23934 - DNA, 18 bp, Gossypium hirsutum
aacgcaaaattggttatt

SEQ ID NO: 23935 - DNA, 17 bp, Gossypium hirsutum
acgcaaaattgcttatt

SEQ ID NO: 23936 - DNA, 25 bp, Gossypium hirsutum
cacctcttttgactccttagtggat

SEQ ID NO: 23937 - DNA, 20 bp, Gossypium hirsutum
aaaaccttgcacacgccaaa

SEQ ID NO: 23938 - DNA, 18 bp, Gossypium hirsutum
cgtgtgtaacacctcagt

SEQ ID NO: 23939 - DNA, 18 bp, Gossypium hirsutum
cgtgtgtaacaccccagt

SEQ ID NO: 23940 - DNA, 30 bp, Gossypium hirsutum
acgagatcatgattaagattgtttgaggaa

SEQ ID NO: 23941 - DNA, 27 bp, Gossypium hirsutum
gcataacacggaattcataatgtccat

SEQ ID NO: 23942 - DNA, 18 bp, Gossypium hirsutum
catatctgtgcctttaac

SEQ ID NO: 23943 - DNA, 18 bp, Gossypium hirsutum
catatctgtgtctttaac

SEQ ID NO: 23944 - DNA, 35 bp, Gossypium hirsutum
tcaaatattaatttgagatctggctattatcggtt

SEQ ID NO: 23945 - DNA, 29 bp, Gossypium hirsutum
cgtctcatacttcatcatgatctcttctt

SEQ ID NO: 23946 - DNA, 18 bp, Gossypium hirsutum
ttgcagaaagctatttga

SEQ ID NO: 23947 - DNA, 15 bp, Gossypium hirsutum
cagaaagcgatttga

SEQ ID NO: 23948 - DNA, 29 bp, Gossypium hirsutum
gggattttctttgtggatttacgttttgt

SEQ ID NO: 23949 - DNA, 25 bp, Gossypium hirsutum
ccctctccctctacccttgataaag

SEQ ID NO: 23950 - DNA, 16 bp, Gossypium hirsutum
atcccaatcatcaagc

SEQ ID NO: 23951 - DNA, 16 bp, Gossypium hirsutum
atcccaatcgtcaagc

SEQ ID NO: 23952 - DNA, 28 bp, Gossypium hirsutum
ccaagcattcaacttagtgacctataga

SEQ ID NO: 23953 - DNA, 31 bp, Gossypium hirsutum
ccattaagttaaaaaggaaaactacgtcgtt

SEQ ID NO: 23954 - DNA, 21 bp, Gossypium hirsutum
cattaagttaaaagacaaaac

SEQ ID NO: 23955 - DNA, 20 bp, Gossypium hirsutum
attaagttaaaaggcaaaac

SEQ ID NO: 23956 - DNA, 41 bp, Gossypium hirsutum
gcgtttatatgaatcgattatttaactagtagatgaagtac

SEQ ID NO: 23957 - DNA, 26 bp, Gossypium hirsutum
tgaccacctcaaacaaagattatcca

SEQ ID NO: 23958 - DNA, 21 bp, Gossypium hirsutum
atgtactcaattttacatttt

SEQ ID NO: 23959 - DNA, 21 bp, Gossypium hirsutum
atgtactcaattttatatttt

SEQ ID NO: 23960 - DNA, 35 bp, Gossypium hirsutum
gctttgatgcatgtttattcagttttattttatcg

SEQ ID NO: 23961 - DNA, 36 bp, Gossypium hirsutum
tgctatcgatccttgtagtttgataaaatctaaaaa

SEQ ID NO: 23962 - DNA, 19 bp, Gossypium hirsutum
atgattggattataatttt

SEQ ID NO: 23963 - DNA, 19 bp, Gossypium hirsutum
atgattggattataaattt

SEQ ID NO: 23964 - DNA, 39 bp, Gossypium hirsutum
tgagtttcgatttaataattttatttcaagtatgacgtt

SEQ ID NO: 23965 - DNA, 24 bp, Gossypium hirsutum
ccttctttcctctctaggcaatcc

SEQ ID NO: 23966 - DNA, 22 bp, Gossypium hirsutum
atctttcttctcaaaaccatat

SEQ ID NO: 23967 - DNA, 20 bp, Gossypium hirsutum
ctttcttctcaaagccatat

SEQ ID NO: 23968 - DNA, 22 bp, Gossypium hirsutum
gattacccatggctggtttgtg

SEQ ID NO: 23969 - DNA, 21 bp, Gossypium hirsutum
ccggagtcgcttagttaccaa

SEQ ID NO: 23970 - DNA, 20 bp, Gossypium hirsutum
atgctgaggatattggagag

SEQ ID NO: 23971 - DNA, 20 bp, Gossypium hirsutum
atgctgaggatattagagag

SEQ ID NO: 23972 - DNA, 25 bp, Gossypium hirsutum
tgctactgaaactgggtcttagagt

SEQ ID NO: 23973 - DNA, 30 bp, Gossypium hirsutum
ggtcaatcaaagcaatcacattagtatcaa

SEQ ID NO: 23974 - DNA, 16 bp, Gossypium hirsutum
tcctcgcctgatgtta

SEQ ID NO: 23975 - DNA, 14 bp, Gossypium hirsutum
ctcgccagatgtta

SEQ ID NO: 23976 - DNA, 15 bp, Gossypium hirsutum
gcccgcgaggatgct

SEQ ID NO: 23977 - DNA, 24 bp, Gossypium hirsutum
gaagatatgcttcgttgttgtgca

SEQ ID NO: 23978 - DNA, 21 bp, Gossypium hirsutum
ccaattacttttgagctctaa

SEQ ID NO: 23979 - DNA, 21 bp, Gossypium hirsutum
ccaattacttttgaactctaa

SEQ ID NO: 23980 - DNA, 26 bp, Gossypium hirsutum
ctgttattgtacgcaaactcaaccaa

SEQ ID NO: 23981 - DNA, 25 bp, Gossypium hirsutum
ccgaagtctcagactcatatgcaaa

SEQ ID NO: 23982 - DNA, 16 bp, Gossypium hirsutum
ttctaaccccaaaact

SEQ ID NO: 23983 - DNA, 16 bp, Gossypium hirsutum
cttctaacccaaaact

SEQ ID NO: 23984 - DNA, 27 bp, Gossypium hirsutum
gcgctgatccatatcactatcaaatct

SEQ ID NO: 23985 - DNA, 21 bp, Gossypium hirsutum
ccgagattgttggccctatcc

SEQ ID NO: 23986 - DNA, 19 bp, Gossypium hirsutum
tttgtcttctttgcctttg

SEQ ID NO: 23987 - DNA, 20 bp, Gossypium hirsutum
ctttgtcttcttttcctttg

SEQ ID NO: 23988 - DNA, 25 bp, Gossypium hirsutum
cccgattcgttgactactttatgga

SEQ ID NO: 23989 - DNA, 23 bp, Gossypium hirsutum
gcagacttgcttgagccaataaa

SEQ ID NO: 23990 - DNA, 16 bp, Gossypium hirsutum
cgatgcttcatttcga

SEQ ID NO: 23991 - DNA, 17 bp, Gossypium hirsutum
acgatgcttcctttcga

SEQ ID NO: 23992 - DNA, 23 bp, Gossypium hirsutum
cctcacacttccgaacagaatgg

SEQ ID NO: 23993 - DNA, 25 bp, Gossypium hirsutum
gggcaaacttcattgactttaacca

SEQ ID NO: 23994 - DNA, 18 bp, Gossypium hirsutum
caccatgtaaacataaaa

SEQ ID NO: 23995 - DNA, 17 bp, Gossypium hirsutum
accatgtaaaaataaaa

SEQ ID NO: 23996 - DNA, 32 bp, Gossypium hirsutum
tcttttccttgttcatctttgcaagtaaaatt

SEQ ID NO: 23997 - DNA, 25 bp, Gossypium hirsutum
tgccggaatctgaaaactaattcct

SEQ ID NO: 23998 - DNA, 19 bp, Gossypium hirsutum
ctctatgatggataacttt

SEQ ID NO: 23999 - DNA, 18 bp, Gossypium hirsutum
ctctatgatgataacttt

SEQ ID NO: 24000 - DNA, 26 bp, Gossypium hirsutum
gcaaccaacagaacaaaacaaaaagt

SEQ ID NO: 24001 - DNA, 23 bp, Gossypium hirsutum
ggttcgtgtgattcttgcctttt

SEQ ID NO: 24002 - DNA, 18 bp, Gossypium hirsutum
cataccatacaaaatatt

SEQ ID NO: 24003 - DNA, 19 bp, Gossypium hirsutum
acataccatacataatatt

SEQ ID NO: 24004 - DNA, 27 bp, Gossypium hirsutum
cactagaaaacaggatgttggatctca

SEQ ID NO: 24005 - DNA, 27 bp, Gossypium hirsutum
tgtctttcattccaaggcataacttgt

SEQ ID NO: 24006 - DNA, 19 bp, Gossypium hirsutum
caaatatgaagcacatgga

SEQ ID NO: 24007 - DNA, 19 bp, Gossypium hirsutum
caaatatgaaacacatgga

SEQ ID NO: 24008 - DNA, 25 bp, Gossypium hirsutum
ggatggctatatttctgggagtgaa

SEQ ID NO: 24009 - DNA, 31 bp, Gossypium hirsutum
acttcatccaagttaattcactttccatact

SEQ ID NO: 24010 - DNA, 22 bp, Gossypium hirsutum
cattttctattttttaaaaaat

SEQ ID NO: 24011 - DNA, 22 bp, Gossypium hirsutum
cattttctatttttttaaaaat

SEQ ID NO: 24012 - DNA, 50 bp, Gossypium hirsutum
ggaaaaaaatccataatttattttatttctgaggtttctattatagaaaa

SEQ ID NO: 24013 - DNA, 18 bp, Gossypium hirsutum
gcgtggcaatggctcttc

SEQ ID NO: 24014 - DNA, 20 bp, Gossypium hirsutum
ccctaattttccattctcaa

SEQ ID NO: 24015 - DNA, 20 bp, Gossypium hirsutum
ccctaattttccagtctcaa

SEQ ID NO: 24016 - DNA, 29 bp, Gossypium hirsutum
catctctttttcttttcttttgccacaag

SEQ ID NO: 24017 - DNA, 23 bp, Gossypium hirsutum
caaactagtcaagccacggaaaa

SEQ ID NO: 24018 - DNA, 23 bp, Gossypium hirsutum
catagatatgttcatcataacaa

SEQ ID NO: 24019 - DNA, 18 bp, Gossypium hirsutum
atatgttcatcaaaacaa

SEQ ID NO: 24020 - DNA, 34 bp, Gossypium hirsutum
agctaaattgattaaattaaccattccaacaaca

SEQ ID NO: 24021 - DNA, 25 bp, Gossypium hirsutum
gctgttcttgtggatgtaagtgttc

SEQ ID NO: 24022 - DNA, 15 bp, Gossypium hirsutum
ctctgctaaaaactg

SEQ ID NO: 24023 - DNA, 14 bp, Gossypium hirsutum
tctgctaaaagctg

SEQ ID NO: 24024 - DNA, 19 bp, Gossypium hirsutum
cgtgtggaccttgcgagaa

SEQ ID NO: 24025 - DNA, 26 bp, Gossypium hirsutum
tgttctcttcttcaaatgccccataa

SEQ ID NO: 24026 - DNA, 20 bp, Gossypium hirsutum
ctatttagttggaaaataca

SEQ ID NO: 24027 - DNA, 19 bp, Gossypium hirsutum
ctatttagttggaaataca

SEQ ID NO: 24028 - DNA, 41 bp, Gossypium hirsutum
ggttgactttggttggaaaataaataattagaaaaatatga

SEQ ID NO: 24029 - DNA, 31 bp, Gossypium hirsutum
cggtagagctactgacataactcaatattac

SEQ ID NO: 24030 - DNA, 23 bp, Gossypium hirsutum
tcttattttgctatatcaaggat

SEQ ID NO: 24031 - DNA, 24 bp, Gossypium hirsutum
ttcttattttgctatattaaggat

SEQ ID NO: 24032 - DNA, 30 bp, Gossypium hirsutum
gctgttatagttgatgaagtagatgaggat

SEQ ID NO: 24033 - DNA, 25 bp, Gossypium hirsutum
caaacccagtaaagcccaaaatgaa

SEQ ID NO: 24034 - DNA, 19 bp, Gossypium hirsutum
ttggatctcttaatgtttc

SEQ ID NO: 24035 - DNA, 19 bp, Gossypium hirsutum
ttggatctctttatgtttc

SEQ ID NO: 24036 - DNA, 25 bp, Gossypium hirsutum
tctcatctacagaattgccgaaacc

SEQ ID NO: 24037 - DNA, 29 bp, Gossypium hirsutum
tcatgccattttcaaactccctaaatttg

SEQ ID NO: 24038 - DNA, 16 bp, Gossypium hirsutum
cctgaggttttcattg

SEQ ID NO: 24039 - DNA, 16 bp, Gossypium hirsutum
cctgagtttttcattg

SEQ ID NO: 24040 - DNA, 22 bp, Gossypium hirsutum
gccttgggtgttgtcacttaga

SEQ ID NO: 24041 - DNA, 27 bp, Gossypium hirsutum
ggcaaattagtctttgtccgttagatc

SEQ ID NO: 24042 - DNA, 18 bp, Gossypium hirsutum
agcaaagtgattcttttt

SEQ ID NO: 24043 - DNA, 16 bp, Gossypium hirsutum
caaagtggttcttttt

SEQ ID NO: 24044 - DNA, 29 bp, Gossypium hirsutum
attcgtcaaccacgctaaattttaacaat

SEQ ID NO: 24045 - DNA, 25 bp, Gossypium hirsutum
acagagaaagccatacaacaacgat

SEQ ID NO: 24046 - DNA, 19 bp, Gossypium hirsutum
acaacccaataacgtaaat

SEQ ID NO: 24047 - DNA, 16 bp, Gossypium hirsutum
acccaatgacgtaaat

SEQ ID NO: 24048 - DNA, 40 bp, Gossypium hirsutum
gtaaatttatgttctggtcaatgaattatttgaaagtttt

SEQ ID NO: 24049 - DNA, 25 bp, Gossypium hirsutum
ttgtgtcagtgtagggaatggttac

SEQ ID NO: 24050 - DNA, 17 bp, Gossypium hirsutum
caagcatcacagcacac

SEQ ID NO: 24051 - DNA, 16 bp, Gossypium hirsutum
aagcatcacaacacac

SEQ ID NO: 24052 - DNA, 25 bp, Gossypium hirsutum
accgacacattcatccccaatttat

SEQ ID NO: 24053 - DNA, 29 bp, Gossypium hirsutum
tcgagttagccgaaaatcagaataagaaa

SEQ ID NO: 24054 - DNA, 22 bp, Gossypium hirsutum
tctaaaattaaaagtcaaaatt

SEQ ID NO: 24055 - DNA, 23 bp, Gossypium hirsutum
ttctaaaattaaaagttaaaatt

SEQ ID NO: 24056 - DNA, 48 bp, Gossypium hirsutum
caaagtacaagattatttaactacataaacaatataattgttttacct

SEQ ID NO: 24057 - DNA, 28 bp, Gossypium hirsutum
caggtactatttggttagggtctattgc

SEQ ID NO: 24058 - DNA, 16 bp, Gossypium hirsutum
aaatgactcaattttg

SEQ ID NO: 24059 - DNA, 17 bp, Gossypium hirsutum
aaaatgactcagttttg

SEQ ID NO: 24060 - DNA, 27 bp, Gossypium hirsutum
cattgtgttggaaaattcaggttcaga

SEQ ID NO: 24061 - DNA, 22 bp, Gossypium hirsutum
gacatgatccccttccttcaca

SEQ ID NO: 24062 - DNA, 13 bp, Gossypium hirsutum
cccgctcatattt

SEQ ID NO: 24063 - DNA, 13 bp, Gossypium hirsutum
cccgcacatattt

SEQ ID NO: 24064 - DNA, 25 bp, Gossypium hirsutum
gtatgagaagcgccattcaaacatc

SEQ ID NO: 24065 - DNA, 23 bp, Gossypium hirsutum
tccaagttccaaaacgacttcgt

SEQ ID NO: 24066 - DNA, 15 bp, Gossypium hirsutum
aagctggtgtgcccg

SEQ ID NO: 24067 - DNA, 16 bp, Gossypium hirsutum
aaagctggtgtacccg

SEQ ID NO: 24068 - DNA, 24 bp, Gossypium hirsutum
ttttggcgaaccatttccactttt

SEQ ID NO: 24069 - DNA, 26 bp, Gossypium hirsutum
actggttactggttgtagaggtaagt

SEQ ID NO: 24070 - DNA, 18 bp, Gossypium hirsutum
catctgctttttgaattt

SEQ ID NO: 24071 - DNA, 17 bp, Gossypium hirsutum
atctgcttcttgaattt

SEQ ID NO: 24072 - DNA, 26 bp, Gossypium hirsutum
gtaggtcatcaagcctaaatcagtca

SEQ ID NO: 24073 - DNA, 20 bp, Gossypium hirsutum
gttggacgtcgttcctttgg

SEQ ID NO: 24074 - DNA, 16 bp, Gossypium hirsutum
tcaccatcagggtgtg

SEQ ID NO: 24075 - DNA, 17 bp, Gossypium hirsutum
atcaccatcaaggtgtg

SEQ ID NO: 24076 - DNA, 22 bp, Gossypium hirsutum
cggaaagtaagcccaccatacg

SEQ ID NO: 24077 - DNA, 24 bp, Gossypium hirsutum
gcaaatactcaggcgtgcttttat

SEQ ID NO: 24078 - DNA, 20 bp, Gossypium hirsutum
cacatgttgaagagtattat

SEQ ID NO: 24079 - DNA, 19 bp, Gossypium hirsutum
acatgttgaagactattat

SEQ ID NO: 24080 - DNA, 23 bp, Gossypium hirsutum
ggttctgctctgacatcaagtgt

SEQ ID NO: 24081 - DNA, 32 bp, Gossypium hirsutum
gaacttgtgttttaatgttcaaaattgaacga

SEQ ID NO: 24082 - DNA, 15 bp, Gossypium hirsutum
ttgtgttgaaatacc

SEQ ID NO: 24083 - DNA, 14 bp, Gossypium hirsutum
tgtgttgcaatacc

SEQ ID NO: 24084 - DNA, 25 bp, Gossypium hirsutum
gcaattacgggagtgacgaaaatag

SEQ ID NO: 24085 - DNA, 25 bp, Gossypium hirsutum
ggtcagtgagttgtgagtcttcaat

SEQ ID NO: 24086 - DNA, 19 bp, Gossypium hirsutum
tctatgcatcctatggttc

SEQ ID NO: 24087 - DNA, 17 bp, Gossypium hirsutum
tatgcatcctgtggttc

SEQ ID NO: 24088 - DNA, 27 bp, Gossypium hirsutum
gcaactacgaaacaatcaggtactcaa

SEQ ID NO: 24089 - DNA, 26 bp, Gossypium hirsutum
gaggcatcaactctcaagagtaactt

SEQ ID NO: 24090 - DNA, 18 bp, Gossypium hirsutum
aaagaataggacaatatc

SEQ ID NO: 24091 - DNA, 20 bp, Gossypium hirsutum
aaaaagaataagacaatatc

SEQ ID NO: 24092 - DNA, 25 bp, Gossypium hirsutum
gcacactagaaagtgagaacatgga

SEQ ID NO: 24093 - DNA, 21 bp, Gossypium hirsutum
gccaagcccttgatgaactgt

SEQ ID NO: 24094 - DNA, 21 bp, Gossypium hirsutum
aatacatgtacatatattttg

SEQ ID NO: 24095 - DNA, 23 bp, Gossypium hirsutum
ttaatacatgtacatttattttg

SEQ ID NO: 24096 - DNA, 27 bp, Gossypium hirsutum
gccgaagtttctatccctcctttaaaa

SEQ ID NO: 24097 - DNA, 32 bp, Gossypium hirsutum
gctggccaaacaaattgtataaaaaagtatca

SEQ ID NO: 24098 - DNA, 22 bp, Gossypium hirsutum
aaatttgctataactatttttt

SEQ ID NO: 24099 - DNA, 23 bp, Gossypium hirsutum
aaaatttgctataattatttttt

SEQ ID NO: 24100 - DNA, 31 bp, Gossypium hirsutum
gttggtgtatgttgatttaaaatccatgtct

SEQ ID NO: 24101 - DNA, 28 bp, Gossypium hirsutum
tgcgctcagaaatttgtaattttgtgat

SEQ ID NO: 24102 - DNA, 18 bp, Gossypium hirsutum
ccaaaatatttgaaaatt

SEQ ID NO: 24103 - DNA, 19 bp, Gossypium hirsutum
cccaaaatattttaaaatt

SEQ ID NO: 24104 - DNA, 45 bp, Gossypium hirsutum
tgagaaattttaaaagtttgagggatttaattaagattttctatt

SEQ ID NO: 24105 - DNA, 27 bp, Gossypium hirsutum
aacttgctcaattaggcatgattacct

SEQ ID NO: 24106 - DNA, 19 bp, Gossypium hirsutum
catggagatctagcttagt

SEQ ID NO: 24107 - DNA, 19 bp, Gossypium hirsutum
catggagatctaccttagt

SEQ ID NO: 24108 - DNA, 25 bp, Gossypium hirsutum
gcatgaactagaagtcgagcacaaa

SEQ ID NO: 24109 - DNA, 29 bp, Gossypium hirsutum
catcttcatcttcactacccaaatatggt

SEQ ID NO: 24110 - DNA, 18 bp, Gossypium hirsutum
ctttacaccacttccacc

SEQ ID NO: 24111 - DNA, 18 bp, Gossypium hirsutum
ctttacaccacctccacc

SEQ ID NO: 24112 - DNA, 28 bp, Gossypium hirsutum
ggaacttctgagtgtttttcttgttgaa

SEQ ID NO: 24113 - DNA, 25 bp, Gossypium hirsutum
agatgcctctctgtcacagattttg

SEQ ID NO: 24114 - DNA, 17 bp, Gossypium hirsutum
aagatgatcccattttt

SEQ ID NO: 24115 - DNA, 20 bp, Gossypium hirsutum
tttaagatgatccctttttt

SEQ ID NO: 24116 - DNA, 29 bp, Gossypium hirsutum
gttaagtacaagacaaagggtaaccaact

SEQ ID NO: 24117 - DNA, 26 bp, Gossypium hirsutum
gcggaaaaatcgaaaacagaagatca

SEQ ID NO: 24118 - DNA, 17 bp, Gossypium hirsutum
atgcagataaatcaaac

SEQ ID NO: 24119 - DNA, 17 bp, Gossypium hirsutum
atgcagataactcaaac

SEQ ID NO: 24120 - DNA, 31 bp, Gossypium hirsutum
accctaaacttttcttgcagattgatttcta

SEQ ID NO: 24121 - DNA, 33 bp, Gossypium hirsutum
gactgtagccattcttaacttgttaaaaaatgt

SEQ ID NO: 24122 - DNA, 16 bp, Gossypium hirsutum
tccaaaaggcgcaaaa

SEQ ID NO: 24123 - DNA, 18 bp, Gossypium hirsutum
attccaaaagacgcaaaa

SEQ ID NO: 24124 - DNA, 24 bp, Gossypium hirsutum
acttgccatgacatctacaaacca

SEQ ID NO: 24125 - DNA, 16 bp, Gossypium hirsutum
gggccaaagcccagga

SEQ ID NO: 24126 - DNA, 16 bp, Gossypium hirsutum
ctagccccctagcttt

SEQ ID NO: 24127 - DNA, 16 bp, Gossypium hirsutum
ctagccccttagcttt

SEQ ID NO: 24128 - DNA, 27 bp, Gossypium hirsutum
acattaacaaatgtttcaagcagaggc

SEQ ID NO: 24129 - DNA, 45 bp, Gossypium hirsutum
aattagcatataataaataatgaaatgcataatttgagatggatt

SEQ ID NO: 24130 - DNA, 20 bp, Gossypium hirsutum
atcaactcaagattaatgac

SEQ ID NO: 24131 - DNA, 17 bp, Gossypium hirsutum
aactcaagataaatgac

SEQ ID NO: 24132 - DNA, 31 bp, Gossypium hirsutum
tgattgagttggtatcacaagttaattcact

SEQ ID NO: 24133 - DNA, 47 bp, Gossypium hirsutum
gtacataaaacctaaatttctttttattttatgatcttgaatctttc

SEQ ID NO: 24134 - DNA, 19 bp, Gossypium hirsutum
ctaagctaaaagcaaagaa

SEQ ID NO: 24135 - DNA, 19 bp, Gossypium hirsutum
ctaagctaaaagcgaagaa

SEQ ID NO: 24136 - DNA, 30 bp, Gossypium hirsutum
tgcttattcttcgattgggtaaagaaatga

SEQ ID NO: 24137 - DNA, 26 bp, Gossypium hirsutum
gttgttgtatgaaagatcgctgcaaa

SEQ ID NO: 24138 - DNA, 22 bp, Gossypium hirsutum
ttcattacaaatcttgattaaa

SEQ ID NO: 24139 - DNA, 24 bp, Gossypium hirsutum
ttttcattacaaatctttattaaa

SEQ ID NO: 24140 - DNA, 37 bp, Gossypium hirsutum
tcagttcttatttaatgttgaattcctttgattaacc

SEQ ID NO: 24141 - DNA, 22 bp, Gossypium hirsutum
gtcaagcgaagcacacaagatg

SEQ ID NO: 24142 - DNA, 15 bp, Gossypium hirsutum
caccgaatcggctac

SEQ ID NO: 24143 - DNA, 14 bp, Gossypium hirsutum
accgaaccggctac

SEQ ID NO: 24144 - DNA, 27 bp, Gossypium hirsutum
tgctgatgacactcctagtactattgt

SEQ ID NO: 24145 - DNA, 27 bp, Gossypium hirsutum
agggactactcccgatatttttaacct

SEQ ID NO: 24146 - DNA, 24 bp, Gossypium hirsutum
ctcatcttaatatttaaatttttt

SEQ ID NO: 24147 - DNA, 22 bp, Gossypium hirsutum
catcttaatatttaaaattttt

SEQ ID NO: 24148 - DNA, 34 bp, Gossypium hirsutum
ctgaaaaatatttgtactctctctctcaatgagt

SEQ ID NO: 24149 - DNA, 23 bp, Gossypium hirsutum
ggactgaccgacttcacaaatga

SEQ ID NO: 24150 - DNA, 16 bp, Gossypium hirsutum
tgcaagcacctcaagg

SEQ ID NO: 24151 - DNA, 14 bp, Gossypium hirsutum
caagcgcctcaagg

SEQ ID NO: 24152 - DNA, 25 bp, Gossypium hirsutum
gggatactttgtgcagtctagttca

SEQ ID NO: 24153 - DNA, 45 bp, Gossypium hirsutum
ctcgaaagaatttagtattagtagagatgaataagtttaatatct

SEQ ID NO: 24154 - DNA, 23 bp, Gossypium hirsutum
agttatatttttatgaaattttt

SEQ ID NO: 24155 - DNA, 23 bp, Gossypium hirsutum
agttatatttttatgaagttttt

SEQ ID NO: 24156 - DNA, 50 bp, Gossypium hirsutum
gttctcgattcaaatcttattataatcaaatttttatcgagttattatat

SEQ ID NO: 24157 - DNA, 38 bp, Gossypium hirsutum
accttttcatcttagtaaataattagagcagtatcatc

SEQ ID NO: 24158 - DNA, 19 bp, Gossypium hirsutum
aatatacagctaggattgc

SEQ ID NO: 24159 - DNA, 20 bp, Gossypium hirsutum
aaatatacaactaggattgc

SEQ ID NO: 24160 - DNA, 22 bp, Gossypium hirsutum
tctcgaggcatgtccattgatg

SEQ ID NO: 24161 - DNA, 27 bp, Gossypium hirsutum
tctgtgttgtatgtcaaatcacctcaa

SEQ ID NO: 24162 - DNA, 18 bp, Gossypium hirsutum
atggcatctacgtgtatg

SEQ ID NO: 24163 - DNA, 17 bp, Gossypium hirsutum
tggcatctacatgtatg

SEQ ID NO: 24164 - DNA, 27 bp, Gossypium hirsutum
ggactatgtgacaatccacatgtatgt

SEQ ID NO: 24165 - DNA, 34 bp, Gossypium hirsutum
ttcatcataacaattttttattcctttgcctctt

SEQ ID NO: 24166 - DNA, 19 bp, Gossypium hirsutum
ccgtaaaataaagcaattc

SEQ ID NO: 24167 - DNA, 19 bp, Gossypium hirsutum
ccgtaaaataaaccaattc

SEQ ID NO: 24168 - DNA, 25 bp, Gossypium hirsutum
cccaaaaccaatcaacccaatcaat

SEQ ID NO: 24169 - DNA, 24 bp, Gossypium hirsutum
ccaatttgaaggctcttgaccaat

SEQ ID NO: 24170 - DNA, 19 bp, Gossypium hirsutum
cttctcttgaagagtctta

SEQ ID NO: 24171 - DNA, 19 bp, Gossypium hirsutum
cttctcttgaaaagtctta

SEQ ID NO: 24172 - DNA, 28 bp, Gossypium hirsutum
tcctcttttctggctaattcaaactctt

SEQ ID NO: 24173 - DNA, 25 bp, Gossypium hirsutum
caaaacaaggcttaaacgagccatt

SEQ ID NO: 24174 - DNA, 17 bp, Gossypium hirsutum
cctgttgttgaagaagt

SEQ ID NO: 24175 - DNA, 16 bp, Gossypium hirsutum
ctgttgttggagaagt

SEQ ID NO: 24176 - DNA, 24 bp, Gossypium hirsutum
cattgcaaacgtgttgagttagct

SEQ ID NO: 24177 - DNA, 30 bp, Gossypium hirsutum
gtcacatttgttgccaaagtaactatgatt

SEQ ID NO: 24178 - DNA, 18 bp, Gossypium hirsutum
ttgtatgtgctaacaatt

SEQ ID NO: 24179 - DNA, 17 bp, Gossypium hirsutum
tgtatgtgctagcaatt

SEQ ID NO: 24180 - DNA, 25 bp, Gossypium hirsutum
gctcacataagacccgaatatgagt

SEQ ID NO: 24181 - DNA, 22 bp, Gossypium hirsutum
agtgtggtatgggagtggaaga

SEQ ID NO: 24182 - DNA, 16 bp, Gossypium hirsutum
ctgccatcgatcataa

SEQ ID NO: 24183 - DNA, 16 bp, Gossypium hirsutum
ctgccatcaatcataa

SEQ ID NO: 24184 - DNA, 25 bp, Gossypium hirsutum
tgaacaatgttgaaggcctcaagaa

SEQ ID NO: 24185 - DNA, 25 bp, Gossypium hirsutum
ttggagctcaacatttcatcagtga

SEQ ID NO: 24186 - DNA, 19 bp, Gossypium hirsutum
acagaattatggaaggtgt

SEQ ID NO: 24187 - DNA, 18 bp, Gossypium hirsutum
cagaattatggaaggcgt

SEQ ID NO: 24188 - DNA, 26 bp, Gossypium hirsutum
ttgtgttgcatatttgcagaaacctt

SEQ ID NO: 24189 - DNA, 27 bp, Gossypium hirsutum
ggttactcggtcatatttcaaaacaca

SEQ ID NO: 24190 - DNA, 21 bp, Gossypium hirsutum
attcttcattctttcttttct

SEQ ID NO: 24191 - DNA, 20 bp, Gossypium hirsutum
ttcttcattctttattttct

SEQ ID NO: 24192 - DNA, 35 bp, Gossypium hirsutum
gccattgcatcaataggaatattactatatgaaga

SEQ ID NO: 24193 - DNA, 49 bp, Gossypium hirsutum
gtaaattatgtctaagtttgttaaactattagtaagtttacattttagt

SEQ ID NO: 24194 - DNA, 20 bp, Gossypium hirsutum
ctgaattatttgaaaatttt

SEQ ID NO: 24195 - DNA, 20 bp, Gossypium hirsutum
ctgaattatttgaaagtttt

SEQ ID NO: 24196 - DNA, 27 bp, Gossypium hirsutum
ccatacagcttcagttttaacaaccaa

SEQ ID NO: 24197 - DNA, 30 bp, Gossypium hirsutum
caattcttggtggattgattgtttcaaaac

SEQ ID NO: 24198 - DNA, 25 bp, Gossypium hirsutum
tcattaaacatgataagtatgaggt

SEQ ID NO: 24199 - DNA, 23 bp, Gossypium hirsutum
attaaacatgataagtataaggt

SEQ ID NO: 24200 - DNA, 26 bp, Gossypium hirsutum
tggaaaagtaaaagtgctggtaagct

SEQ ID NO: 24201 - DNA, 34 bp, Gossypium hirsutum
cgtgttgactgagaaaaaaaatgaaatggatatt

SEQ ID NO: 24202 - DNA, 22 bp, Gossypium hirsutum
tgaataccctgttaaatatata

SEQ ID NO: 24203 - DNA, 22 bp, Gossypium hirsutum
tgaataccctgttaattatata

SEQ ID NO: 24204 - DNA, 25 bp, Gossypium hirsutum
ctgtccttttcttataccccccttt

SEQ ID NO: 24205 - DNA, 20 bp, Gossypium hirsutum
cagcaccatgcggaagaaaa

SEQ ID NO: 24206 - DNA, 20 bp, Gossypium hirsutum
tctctacatgaacgtataag

SEQ ID NO: 24207 - DNA, 20 bp, Gossypium hirsutum
tctctacatgaaagtataag

SEQ ID NO: 24208 - DNA, 29 bp, Gossypium hirsutum
ccaaagttctcactagaaacttcatctct

SEQ ID NO: 24209 - DNA, 33 bp, Gossypium hirsutum
cattacaatattcttcttcaatgtgcaaactct

SEQ ID NO: 24210 - DNA, 18 bp, Gossypium hirsutum
cgtattccaaaatttact

SEQ ID NO: 24211 - DNA, 18 bp, Gossypium hirsutum
cgtattccaaattttact

SEQ ID NO: 24212 - DNA, 39 bp, Gossypium hirsutum
gagaaattaaatttataaaaatgctgagtcgagtgatat

SEQ ID NO: 24213 - DNA, 26 bp, Gossypium hirsutum
gacggccatcaaagccataaaataat

SEQ ID NO: 24214 - DNA, 22 bp, Gossypium hirsutum
atgtgtcaaaaaaaaatgtcat

SEQ ID NO: 24215 - DNA, 21 bp, Gossypium hirsutum
atgtgtcaaaaaaaatgtcat

SEQ ID NO: 24216 - DNA, 32 bp, Gossypium hirsutum
gtttaccatttaaacactcacgttacatagtt

SEQ ID NO: 24217 - DNA, 24 bp, Gossypium hirsutum
ggagccttaaggtagccaaatctg

SEQ ID NO: 24218 - DNA, 17 bp, Gossypium hirsutum
aacagacaggcagttag

SEQ ID NO: 24219 - DNA, 15 bp, Gossypium hirsutum
cagacaggcggttag

SEQ ID NO: 24220 - DNA, 27 bp, Gossypium hirsutum
tccccaactatctatgtttcacttcct

SEQ ID NO: 24221 - DNA, 25 bp, Gossypium hirsutum
cttgtgagaaaaatacccagcactt

SEQ ID NO: 24222 - DNA, 19 bp, Gossypium hirsutum
ttctctgtcatttatttgc

SEQ ID NO: 24223 - DNA, 17 bp, Gossypium hirsutum
ctctgtcatatatttgc

SEQ ID NO: 24224 - DNA, 34 bp, Gossypium hirsutum
acctctataatttttttcccattctggttaatga

SEQ ID NO: 24225 - DNA, 20 bp, Gossypium hirsutum
ggtgcataggcaggcagtag

SEQ ID NO: 24226 - DNA, 19 bp, Gossypium hirsutum
ctaggaaatctgaaagtga

SEQ ID NO: 24227 - DNA, 18 bp, Gossypium hirsutum
taggaaatctgcaagtga

SEQ ID NO: 24228 - DNA, 27 bp, Gossypium hirsutum
ctaagccacatgttccaaattttgaga

SEQ ID NO: 24229 - DNA, 24 bp, Gossypium hirsutum
aggctcaggaacaaaacaaattgg

SEQ ID NO: 24230 - DNA, 16 bp, Gossypium hirsutum
ctgacctgactttgat

SEQ ID NO: 24231 - DNA, 16 bp, Gossypium hirsutum
ctgacctgattttgat

SEQ ID NO: 24232 - DNA, 26 bp, Gossypium hirsutum
cagctaatccctccaaaagaagagaa

SEQ ID NO: 24233 - DNA, 23 bp, Gossypium hirsutum
ccggtatgcttataggcgtcaag

SEQ ID NO: 24234 - DNA, 17 bp, Gossypium hirsutum
caaagaagccggcgaca

SEQ ID NO: 24235 - DNA, 16 bp, Gossypium hirsutum
aaagaagccggcaaca

SEQ ID NO: 24236 - DNA, 26 bp, Gossypium hirsutum
aaacaaagggatcactgattcagaca

SEQ ID NO: 24237 - DNA, 22 bp, Gossypium hirsutum
ggaacacatggtcgtggtagag

SEQ ID NO: 24238 - DNA, 14 bp, Gossypium hirsutum
ctcagctcgagccc

SEQ ID NO: 24239 - DNA, 15 bp, Gossypium hirsutum
actcaactcgagccc

SEQ ID NO: 24240 - DNA, 22 bp, Gossypium hirsutum
cagcatactgcccaaagaggaa

SEQ ID NO: 24241 - DNA, 37 bp, Gossypium hirsutum
attaaaatcaaaactgaaaaaaatcttaagtgccaaa

SEQ ID NO: 24242 - DNA, 18 bp, Gossypium hirsutum
tcaatgtgtcagatacta

SEQ ID NO: 24243 - DNA, 18 bp, Gossypium hirsutum
tcaatgtgtcaaatacta

SEQ ID NO: 24244 - DNA, 27 bp, Gossypium hirsutum
ggtaggagggtttgattaatgtcatgt

SEQ ID NO: 24245 - DNA, 37 bp, Gossypium hirsutum
agaacgaaacttaaactttattttccaactattgaaa

SEQ ID NO: 24246 - DNA, 16 bp, Gossypium hirsutum
aaagccatactttttg

SEQ ID NO: 24247 - DNA, 16 bp, Gossypium hirsutum
aaagccatactctttg

SEQ ID NO: 24248 - DNA, 25 bp, Gossypium hirsutum
tttggttgcctagaaactcgaagaa

SEQ ID NO: 24249 - DNA, 24 bp, Gossypium hirsutum
ttagcccgacgaactagtaacttg

SEQ ID NO: 24250 - DNA, 18 bp, Gossypium hirsutum
ttcggatactcgagtaac

SEQ ID NO: 24251 - DNA, 16 bp, Gossypium hirsutum
cggatactcgggtaac

SEQ ID NO: 24252 - DNA, 19 bp, Gossypium hirsutum
acgcctttggtgtggtgta

SEQ ID NO: 24253 - DNA, 24 bp, Gossypium hirsutum
gcaccatgggaagaagataaacca

SEQ ID NO: 24254 - DNA, 19 bp, Gossypium hirsutum
cttgtttcaactgtgcttg

SEQ ID NO: 24255 - DNA, 19 bp, Gossypium hirsutum
cttgtttcaactatgcttg

SEQ ID NO: 24256 - DNA, 27 bp, Gossypium hirsutum
tgggaccattctttgggatctgatata

SEQ ID NO: 24257 - DNA, 26 bp, Gossypium hirsutum
caacttagttcagcaaacaagcactt

SEQ ID NO: 24258 - DNA, 18 bp, Gossypium hirsutum
ctacatcatcaaatacgg

SEQ ID NO: 24259 - DNA, 19 bp, Gossypium hirsutum
actacatcatcatatacgg

SEQ ID NO: 24260 - DNA, 25 bp, Gossypium hirsutum
gcggtgaaattgtgatgtctgtatt

SEQ ID NO: 24261 - DNA, 30 bp, Gossypium hirsutum
tgcgttaaaggcaatcatttatcaaaaaga

SEQ ID NO: 24262 - DNA, 21 bp, Gossypium hirsutum
acaataaatttatgggttttt

SEQ ID NO: 24263 - DNA, 22 bp, Gossypium hirsutum
cacaataaatttataggttttt

SEQ ID NO: 24264 - DNA, 31 bp, Gossypium hirsutum
tgggtaaattgtgaaactttaaaaactgagg

SEQ ID NO: 24265 - DNA, 22 bp, Gossypium hirsutum
gagcaggcagaatctggactac

SEQ ID NO: 24266 - DNA, 15 bp, Gossypium hirsutum
tcacgccttgaagac

SEQ ID NO: 24267 - DNA, 14 bp, Gossypium hirsutum
cacgccctgaagac

SEQ ID NO: 24268 - DNA, 26 bp, Gossypium hirsutum
gccatacctactatgagatgaaggga

SEQ ID NO: 24269 - DNA, 37 bp, Gossypium hirsutum
atctaaactaatcagtgtttgactgaaacaaataaac

SEQ ID NO: 24270 - DNA, 21 bp, Gossypium hirsutum
ttaagtatgagttttattttc

SEQ ID NO: 24271 - DNA, 21 bp, Gossypium hirsutum
ttaagtatgacttttattttc

SEQ ID NO: 24272 - DNA, 29 bp, Gossypium hirsutum
gggtgatgtatagagttttaggtgttgaa

SEQ ID NO: 24273 - DNA, 27 bp, Gossypium hirsutum
ggcttatgccatctttagcaatagaga

SEQ ID NO: 24274 - DNA, 26 bp, Gossypium hirsutum
aagagtaaacaataattactttttat

SEQ ID NO: 24275 - DNA, 23 bp, Gossypium hirsutum
agtaaacaataattacattttat

SEQ ID NO: 24276 - DNA, 27 bp, Gossypium hirsutum
ctaccagtattgcaagcatatgttagc

SEQ ID NO: 24277 - DNA, 38 bp, Gossypium hirsutum
aataatatgaaagttattagagctatcaaggaagcatt

SEQ ID NO: 24278 - DNA, 17 bp, Gossypium hirsutum
aatttgaccgcttcgac

SEQ ID NO: 24279 - DNA, 17 bp, Gossypium hirsutum
aatttgaccacttcgac

SEQ ID NO: 24280 - DNA, 24 bp, Gossypium hirsutum
gagttgtccgcctgattattgttg

SEQ ID NO: 24281 - DNA, 28 bp, Gossypium hirsutum
tgaatagtgtaattgccattctgttcca

SEQ ID NO: 24282 - DNA, 17 bp, Gossypium hirsutum
aagtttcacgcagattg

SEQ ID NO: 24283 - DNA, 17 bp, Gossypium hirsutum
aagtttcacacagattg

SEQ ID NO: 24284 - DNA, 33 bp, Gossypium hirsutum
aatacatgctcatctaattgtaaatctttccct

SEQ ID NO: 24285 - DNA, 30 bp, Gossypium hirsutum
tccttttaataggaaagatttgtgctcaca

SEQ ID NO: 24286 - DNA, 22 bp, Gossypium hirsutum
aatcaaagtgaaattttttttt

SEQ ID NO: 24287 - DNA, 19 bp, Gossypium hirsutum
caaagtgaaattatttttt

SEQ ID NO: 24288 - DNA, 29 bp, Gossypium hirsutum
cgttggacttttgatgtctttgataatgg

SEQ ID NO: 24289 - DNA, 28 bp, Gossypium hirsutum
agggaaatgcgaaggtttagatttaaga

SEQ ID NO: 24290 - DNA, 22 bp, Gossypium hirsutum
aaaattaccgataaagttactc

SEQ ID NO: 24291 - DNA, 19 bp, Gossypium hirsutum
attaccgataaggttactc

SEQ ID NO: 24292 - DNA, 25 bp, Gossypium hirsutum
ttgttagcaaccaaatcgtcgtttc

SEQ ID NO: 24293 - DNA, 26 bp, Gossypium hirsutum
gttgtttaggcgatatcaacgatcac

SEQ ID NO: 24294 - DNA, 22 bp, Gossypium hirsutum
caattgcataaaaaaaacccaa

SEQ ID NO: 24295 - DNA, 20 bp, Gossypium hirsutum
aattgcataaaaaaacccaa

SEQ ID NO: 24296 - DNA, 32 bp, Gossypium hirsutum
tgttattacatcaagatagcaatgggatttgt

SEQ ID NO: 24297 - DNA, 39 bp, Gossypium hirsutum
gaaatctcctaatacataaaaatggtgaaaagtatttgt

SEQ ID NO: 24298 - DNA, 21 bp, Gossypium hirsutum
caatttttttttggagaatat

SEQ ID NO: 24299 - DNA, 19 bp, Gossypium hirsutum
aattttttttggagaatat

SEQ ID NO: 24300 - DNA, 31 bp, Gossypium hirsutum
agtacgagatttattattcatgcttcgactc

SEQ ID NO: 24301 - DNA, 34 bp, Gossypium hirsutum
atcaaatgctattcaaacattgaaatctgaaaga

SEQ ID NO: 24302 - DNA, 17 bp, Gossypium hirsutum
tctcctttctgcaaaac

SEQ ID NO: 24303 - DNA, 17 bp, Gossypium hirsutum
tctcctttttgcaaaac

SEQ ID NO: 24304 - DNA, 27 bp, Gossypium hirsutum
ccctatagcagtttttactgggagaaa

SEQ ID NO: 24305 - DNA, 24 bp, Gossypium hirsutum
tgcaatgattttccgacacttcct

SEQ ID NO: 24306 - DNA, 21 bp, Gossypium hirsutum
tttctctaatcacttaagctt

SEQ ID NO: 24307 - DNA, 17 bp, Gossypium hirsutum
tctaatcgcttaagctt

SEQ ID NO: 24308 - DNA, 32 bp, Gossypium hirsutum
caaaattaagaactaacaaatgttggcatcct

SEQ ID NO: 24309 - DNA, 43 bp, Gossypium hirsutum
acgaaattttcacagacataaattcataaataataaacataga

SEQ ID NO: 24310 - DNA, 15 bp, Gossypium hirsutum
tcgtggtcccaaaac

SEQ ID NO: 24311 - DNA, 15 bp, Gossypium hirsutum
tcgtggtcccgaaac

SEQ ID NO: 24312 - DNA, 25 bp, Gossypium hirsutum
gtgtaacagcccgatttagacctta

SEQ ID NO: 24313 - DNA, 30 bp, Gossypium hirsutum
gatgcataatagcaagaattgtgaatgagt

SEQ ID NO: 24314 - DNA, 18 bp, Gossypium hirsutum
atcattgccacgttacaa

SEQ ID NO: 24315 - DNA, 17 bp, Gossypium hirsutum
tcattgccaggttacaa

SEQ ID NO: 24316 - DNA, 30 bp, Gossypium hirsutum
tgagaataaatccaaaatatgttgcaaccg

SEQ ID NO: 24317 - DNA, 25 bp, Gossypium hirsutum
ccagattggcaaatcatgacaaaga

SEQ ID NO: 24318 - DNA, 18 bp, Gossypium hirsutum
ctatggactgcagtacgt

SEQ ID NO: 24319 - DNA, 16 bp, Gossypium hirsutum
atggactgcggtacgt

SEQ ID NO: 24320 - DNA, 25 bp, Gossypium hirsutum
ccaatgtgaccatacaaacaacctt

SEQ ID NO: 24321 - DNA, 25 bp, Gossypium hirsutum
aggtggaactgtaatgaacttgcat

SEQ ID NO: 24322 - DNA, 22 bp, Gossypium hirsutum
atgtattgagttatgattaatt

SEQ ID NO: 24323 - DNA, 21 bp, Gossypium hirsutum
tgtattgagttatgatcaatt

SEQ ID NO: 24324 - DNA, 44 bp, Gossypium hirsutum
aactatgtatatattttaatatgtgatggagtttaagtttgtct

SEQ ID NO: 24325 - DNA, 35 bp, Gossypium hirsutum
ccataacccaaaggttaaattctattattagtcct

SEQ ID NO: 24326 - DNA, 19 bp, Gossypium hirsutum
tctgtagatacaatcattg

SEQ ID NO: 24327 - DNA, 18 bp, Gossypium hirsutum
ctgtagatacagtcattg

SEQ ID NO: 24328 - DNA, 30 bp, Gossypium hirsutum
caatttgcttcgcattaaattaatgactca

SEQ ID NO: 24329 - DNA, 26 bp, Gossypium hirsutum
gggagtgttgggttaatccatttaga

SEQ ID NO: 24330 - DNA, 17 bp, Gossypium hirsutum
agctaaaggagagtaag

SEQ ID NO: 24331 - DNA, 18 bp, Gossypium hirsutum
cagctaaaggatagtaag

SEQ ID NO: 24332 - DNA, 28 bp, Gossypium hirsutum
tgctaacatggttgctattatctcttgt

SEQ ID NO: 24333 - DNA, 25 bp, Gossypium hirsutum
gccatgtaaccttcttcaagtgatg

SEQ ID NO: 24334 - DNA, 21 bp, Gossypium hirsutum
ttaattgaagtagataaaatt

SEQ ID NO: 24335 - DNA, 17 bp, Gossypium hirsutum
ttgaagtagagaaaatt

SEQ ID NO: 24336 - DNA, 33 bp, Gossypium hirsutum
aaattcagtatttttcttgggtttatcaaacga

SEQ ID NO: 24337 - DNA, 26 bp, Gossypium hirsutum
tgctagatatgcctcaaacccttttt

SEQ ID NO: 24338 - DNA, 17 bp, Gossypium hirsutum
tgctttgtcagctcaaa

SEQ ID NO: 24339 - DNA, 17 bp, Gossypium hirsutum
tgctttgtcaactcaaa

SEQ ID NO: 24340 - DNA, 33 bp, Gossypium hirsutum
agttgaattagatagatttgatagcatcaccaa

SEQ ID NO: 24341 - DNA, 23 bp, Gossypium hirsutum
gaagagacagagagcgaaactca

SEQ ID NO: 24342 - DNA, 17 bp, Gossypium hirsutum
cacctttcttgactttt

SEQ ID NO: 24343 - DNA, 16 bp, Gossypium hirsutum
acctttctcgactttt

SEQ ID NO: 24344 - DNA, 20 bp, Gossypium hirsutum
tctccctctccaccaccttt

SEQ ID NO: 24345 - DNA, 26 bp, Gossypium hirsutum
ccgaaaagccaattgtctcctagatt

SEQ ID NO: 24346 - DNA, 21 bp, Gossypium hirsutum
ttagcattgactttgatgtat

SEQ ID NO: 24347 - DNA, 17 bp, Gossypium hirsutum
cattgacttggatgtat

SEQ ID NO: 24348 - DNA, 35 bp, Gossypium hirsutum
tggttggtaattctaatgataattgtttctaaggt

SEQ ID NO: 24349 - DNA, 26 bp, Gossypium hirsutum
ggtccgtcctagagaatttcatgaag

SEQ ID NO: 24350 - DNA, 16 bp, Gossypium hirsutum
actgggaaggacctta

SEQ ID NO: 24351 - DNA, 17 bp, Gossypium hirsutum
aactgggaatgacctta

SEQ ID NO: 24352 - DNA, 24 bp, Gossypium hirsutum
caaaaccaaagcacctccagaaaa

SEQ ID NO: 24353 - DNA, 31 bp, Gossypium hirsutum
gctgggcgttttatatatgaaaagaaaatga

SEQ ID NO: 24354 - DNA, 24 bp, Gossypium hirsutum
atgaattttacttttgataaacta

SEQ ID NO: 24355 - DNA, 21 bp, Gossypium hirsutum
aattttacttttggtaaacta

SEQ ID NO: 24356 - DNA, 30 bp, Gossypium hirsutum
accaaatgagaatctatgaaagttgagtga

SEQ ID NO: 24357 - DNA, 38 bp, Gossypium hirsutum
aaaataagaaatcaatcatatcaccatcaaacaatgaa

SEQ ID NO: 24358 - DNA, 21 bp, Gossypium hirsutum
atgattggatttaacatcatt

SEQ ID NO: 24359 - DNA, 21 bp, Gossypium hirsutum
atgattggatttatcatcatt

SEQ ID NO: 24360 - DNA, 34 bp, Gossypium hirsutum
gctaatgtgttccaaagattttgatttcaatcat

SEQ ID NO: 24361 - DNA, 20 bp, Gossypium hirsutum
ccatatcggccttcaaggct

SEQ ID NO: 24362 - DNA, 19 bp, Gossypium hirsutum
ccacatgatacagttgtta

SEQ ID NO: 24363 - DNA, 19 bp, Gossypium hirsutum
ccacatgatacaattgtta

SEQ ID NO: 24364 - DNA, 54 bp, Gossypium hirsutum
gaatgataattttgaattagtatataaacattatagtattgataatagcatgtg

SEQ ID NO: 24365 - DNA, 22 bp, Gossypium hirsutum
cccgttacgcgtcatcaatttt

SEQ ID NO: 24366 - DNA, 25 bp, Gossypium hirsutum
ctattactatttgttcaattataag

SEQ ID NO: 24367 - DNA, 23 bp, Gossypium hirsutum
attactatttgttcaattattag

SEQ ID NO: 24368 - DNA, 35 bp, Gossypium hirsutum
tccctatataactataactaaaactagcatctgct

SEQ ID NO: 24369 - DNA, 25 bp, Gossypium hirsutum
gggagcaatttaagaagtgtgcaaa

SEQ ID NO: 24370 - DNA, 21 bp, Gossypium hirsutum
ataacagagcaatctcccatc

SEQ ID NO: 24371 - DNA, 17 bp, Gossypium hirsutum
cagagcaatctctcatc

SEQ ID NO: 24372 - DNA, 25 bp, Gossypium hirsutum
gcttgctgaggagttatgttgacta

SEQ ID NO: 24373 - DNA, 33 bp, Gossypium hirsutum
gatgtcgtgtttatgttattttcttgtatcgta

SEQ ID NO: 24374 - DNA, 18 bp, Gossypium hirsutum
ccaaaattttgaaaaaca

SEQ ID NO: 24375 - DNA, 18 bp, Gossypium hirsutum
ccaaaattttaaaaaaca

SEQ ID NO: 24376 - DNA, 32 bp, Gossypium hirsutum
agactgtgtctaaatctatacaactcatagca

SEQ ID NO: 24377 - DNA, 28 bp, Gossypium hirsutum
gtgaaatatctgccatttttgtttccct

SEQ ID NO: 24378 - DNA, 19 bp, Gossypium hirsutum
atgtggaaaatgtaagcca

SEQ ID NO: 24379 - DNA, 16 bp, Gossypium hirsutum
tggaaaatggaagcca

SEQ ID NO: 24380 - DNA, 27 bp, Gossypium hirsutum
ggcaatggtggtactagtattgtttct

SEQ ID NO: 24381 - DNA, 24 bp, Gossypium hirsutum
gcctgactttcttggatccttaga

SEQ ID NO: 24382 - DNA, 19 bp, Gossypium hirsutum
cggatctatcatcaacaag

SEQ ID NO: 24383 - DNA, 19 bp, Gossypium hirsutum
cggatctatcatcgacaag

SEQ ID NO: 24384 - DNA, 25 bp, Gossypium hirsutum
acacactgatctgaagcctgaaaat

SEQ ID NO: 24385 - DNA, 25 bp, Gossypium hirsutum
atcacattcaccttcaagtgcctaa

SEQ ID NO: 24386 - DNA, 23 bp, Gossypium hirsutum
actaattatggtaagatcttaag

SEQ ID NO: 24387 - DNA, 22 bp, Gossypium hirsutum
ctaattatggtaagatattaag

SEQ ID NO: 24388 - DNA, 27 bp, Gossypium hirsutum
gagcaagttaattcatgccttgaaaga

SEQ ID NO: 24389 - DNA, 25 bp, Gossypium hirsutum
aaacaatttcgggagacagtagcat

SEQ ID NO: 24390 - DNA, 21 bp, Gossypium hirsutum
tctacttctgtatgtaactgt

SEQ ID NO: 24391 - DNA, 19 bp, Gossypium hirsutum
ctacttctgtatgaactgt

SEQ ID NO: 24392 - DNA, 25 bp, Gossypium hirsutum
tggacggcaatgtttatgatggtaa

SEQ ID NO: 24393 - DNA, 34 bp, Gossypium hirsutum
aaagatcaaatgttttattagagaacaaagcaca

SEQ ID NO: 24394 - DNA, 17 bp, Gossypium hirsutum
tgtttggtataattttg

SEQ ID NO: 24395 - DNA, 18 bp, Gossypium hirsutum
atgtttggtatcattttg

SEQ ID NO: 24396 - DNA, 30 bp, Gossypium hirsutum
gacttagtcatcatatctgcaggattttca

SEQ ID NO: 24397 - DNA, 23 bp, Gossypium hirsutum
aaatttgtcttcccctgcatcct

SEQ ID NO: 24398 - DNA, 14 bp, Gossypium hirsutum
ccgtgggtgatgtg

SEQ ID NO: 24399 - DNA, 14 bp, Gossypium hirsutum
ccgtggctgatgtg

SEQ ID NO: 24400 - DNA, 24 bp, Gossypium hirsutum
gtacacggtttccttgttgagaac

SEQ ID NO: 24401 - DNA, 32 bp, Gossypium hirsutum
gtcacattccataaacctccattcaatttaat

SEQ ID NO: 24402 - DNA, 16 bp, Gossypium hirsutum
cctaaactcgaacttt

SEQ ID NO: 24403 - DNA, 16 bp, Gossypium hirsutum
cctaaactcaaacttt

SEQ ID NO: 24404 - DNA, 25 bp, Gossypium hirsutum
atccgtcgtattttggtaagttcgt

SEQ ID NO: 24405 - DNA, 24 bp, Gossypium hirsutum
cagcaaatttaagcccaagtgtct

SEQ ID NO: 24406 - DNA, 21 bp, Gossypium hirsutum
atacccattttttgacgttac

SEQ ID NO: 24407 - DNA, 22 bp, Gossypium hirsutum
catacccatttttttacgttac

SEQ ID NO: 24408 - DNA, 25 bp, Gossypium hirsutum
agtcgattggataagtgggtttagc

SEQ ID NO: 24409 - DNA, 27 bp, Gossypium hirsutum
tctgcgtactagtcgctttaaaaatca

SEQ ID NO: 24410 - DNA, 20 bp, Gossypium hirsutum
actagactcatatgcccatc

SEQ ID NO: 24411 - DNA, 22 bp, Gossypium hirsutum
aaactagactcatattcccatc

SEQ ID NO: 24412 - DNA, 24 bp, Gossypium hirsutum
cctgtaacatgggagactttgact

SEQ ID NO: 24413 - DNA, 54 bp, Gossypium hirsutum
gtttcagtgttattatatatttattattataccctataattacatgtcatcttt

SEQ ID NO: 24414 - DNA, 20 bp, Gossypium hirsutum
atcttgttcataaaatttta

SEQ ID NO: 24415 - DNA, 20 bp, Gossypium hirsutum
atcttgttcataaattttta

SEQ ID NO: 24416 - DNA, 44 bp, Gossypium hirsutum
ggttgcatgtgagattaagtattatatcaataaaataatatgat

SEQ ID NO: 24417 - DNA, 50 bp, Gossypium hirsutum
ctatgaaatagtcatctaattatgatttttttatcattcaactatgaaaa

SEQ ID NO: 24418 - DNA, 20 bp, Gossypium hirsutum
cttaactatgaaaaatttca

SEQ ID NO: 24419 - DNA, 20 bp, Gossypium hirsutum
cttaactatgaaaagtttca

SEQ ID NO: 24420 - DNA, 41 bp, Gossypium hirsutum
catttttgatgtttttatttttatgttagccaattagtgat

SEQ ID NO: 24421 - DNA, 33 bp, Gossypium hirsutum
caaacatcgatttccaaagtacagatttcataa

SEQ ID NO: 24422 - DNA, 25 bp, Gossypium hirsutum
tgaacatacttgtaattatatctaa

SEQ ID NO: 24423 - DNA, 22 bp, Gossypium hirsutum
acatacttgtaattgtatctaa

SEQ ID NO: 24424 - DNA, 25 bp, Gossypium hirsutum
agttgctaatggttccaatcatgct

SEQ ID NO: 24425 - DNA, 27 bp, Gossypium hirsutum
gagcctttttctgatagtgaagttgag

SEQ ID NO: 24426 - DNA, 19 bp, Gossypium hirsutum
ttccaacttctctgaacac

SEQ ID NO: 24427 - DNA, 16 bp, Gossypium hirsutum
caacttctcagaacac

SEQ ID NO: 24428 - DNA, 25 bp, Gossypium hirsutum
gagatttgggtccctcttcttcatt

SEQ ID NO: 24429 - DNA, 25 bp, Gossypium hirsutum
accaggaaatgcatggttgttaact

SEQ ID NO: 24430 - DNA, 20 bp, Gossypium hirsutum
acctctttaaagacaaagta

SEQ ID NO: 24431 - DNA, 18 bp, Gossypium hirsutum
ctctttaaaggcaaagta

SEQ ID NO: 24432 - DNA, 28 bp, Gossypium hirsutum
cctggcttatagatatcaaccacaatga

SEQ ID NO: 24433 - DNA, 34 bp, Gossypium hirsutum
gacataatcaagtgactaataatgcaatttaccc

SEQ ID NO: 24434 - DNA, 21 bp, Gossypium hirsutum
ttatagattaaatcgaaattc

SEQ ID NO: 24435 - DNA, 21 bp, Gossypium hirsutum
ttatagattaaatcaaaattc

SEQ ID NO: 24436 - DNA, 24 bp, Gossypium hirsutum
gtgctacgccatcatactttaacg

SEQ ID NO: 24437 - DNA, 26 bp, Gossypium hirsutum
gggattacttctacagaggtgagtgt

SEQ ID NO: 24438 - DNA, 21 bp, Gossypium hirsutum
caccatattaacgttataaag

SEQ ID NO: 24439 - DNA, 21 bp, Gossypium hirsutum
caccatattaacattataaag

SEQ ID NO: 24440 - DNA, 28 bp, Gossypium hirsutum
aaaatttactcaatggaccacatgcaag

SEQ ID NO: 24441 - DNA, 26 bp, Gossypium hirsutum
tgcatatagtgaaaaagtggcgtagt

SEQ ID NO: 24442 - DNA, 16 bp, Gossypium hirsutum
ctgttagggcgtaacc

SEQ ID NO: 24443 - DNA, 15 bp, Gossypium hirsutum
tgttagggcataacc

SEQ ID NO: 24444 - DNA, 43 bp, Gossypium hirsutum
caaaataaatcattacatcgaactctttacaacatatacaata

SEQ ID NO: 24445 - DNA, 25 bp, Gossypium hirsutum
agcactctgcaaccagtattagttt

SEQ ID NO: 24446 - DNA, 14 bp, Gossypium hirsutum
tgctcggaatctga

SEQ ID NO: 24447 - DNA, 15 bp, Gossypium hirsutum
atgctcagaatctga

SEQ ID NO: 24448 - DNA, 24 bp, Gossypium hirsutum
ccagtagcttcccactaagaaacc

SEQ ID NO: 24449 - DNA, 25 bp, Gossypium hirsutum
cgaggcattaccagacttaaccata

SEQ ID NO: 24450 - DNA, 15 bp, Gossypium hirsutum
acatagacgaaaatc

SEQ ID NO: 24451 - DNA, 15 bp, Gossypium hirsutum
acatagatgaaaatc

SEQ ID NO: 24452 - DNA, 32 bp, Gossypium hirsutum
tgtctttaaatatgagtctatgcatgtgttca

SEQ ID NO: 24453 - DNA, 25 bp, Gossypium hirsutum
gaacgaacgacgagaatcttgaatt

SEQ ID NO: 24454 - DNA, 16 bp, Gossypium hirsutum
catggatgagaatgaa

SEQ ID NO: 24455 - DNA, 16 bp, Gossypium hirsutum
catggatgaaaatgaa

SEQ ID NO: 24456 - DNA, 23 bp, Gossypium hirsutum
ctggtcttagaacatgcccttgt

SEQ ID NO: 24457 - DNA, 33 bp, Gossypium hirsutum
ccttcttacttcacatatccagtattgactatt

SEQ ID NO: 24458 - DNA, 19 bp, Gossypium hirsutum
caacaaaaccatatacttt

SEQ ID NO: 24459 - DNA, 17 bp, Gossypium hirsutum
acaaaaccacatacttt

SEQ ID NO: 24460 - DNA, 25 bp, Gossypium hirsutum
cgtctgacaaacacgtcattctttg

SEQ ID NO: 24461 - DNA, 22 bp, Gossypium hirsutum
gcaaggtgggactagcaatcta

SEQ ID NO: 24462 - DNA, 20 bp, Gossypium hirsutum
tcatgaagaattgtgcactt

SEQ ID NO: 24463 - DNA, 22 bp, Gossypium hirsutum
attcatgaagaattatgcactt

SEQ ID NO: 24464 - DNA, 25 bp, Gossypium hirsutum
ggaaattcccagcaaaggatgtttt

SEQ ID NO: 24465 - DNA, 28 bp, Gossypium hirsutum
atgatattagagtacaagcatgtgtggg

SEQ ID NO: 24466 - DNA, 14 bp, Gossypium hirsutum
cccaaatgctgccc

SEQ ID NO: 24467 - DNA, 13 bp, Gossypium hirsutum
cccaatgctgccc

SEQ ID NO: 24468 - DNA, 28 bp, Gossypium hirsutum
gcttaaacatggcacctcataacataaa

SEQ ID NO: 24469 - DNA, 25 bp, Gossypium hirsutum
tgtaaagataacagtggcggtgaaa

SEQ ID NO: 24470 - DNA, 20 bp, Gossypium hirsutum
tatattgtagcgtgagataa

SEQ ID NO: 24471 - DNA, 21 bp, Gossypium hirsutum
ctatattgtagcgtgtgataa

SEQ ID NO: 24472 - DNA, 24 bp, Gossypium hirsutum
ggtgcggtgcgtttaacttatttt

SEQ ID NO: 24473 - DNA, 24 bp, Gossypium hirsutum
agggagtgtaatttggtggtgttg

SEQ ID NO: 24474 - DNA, 17 bp, Gossypium hirsutum
catgacaaaggacaaac

SEQ ID NO: 24475 - DNA, 16 bp, Gossypium hirsutum
atgacaaaagacaaac

SEQ ID NO: 24476 - DNA, 32 bp, Gossypium hirsutum
cgattcaccaattaaaagaggatatacaacct

SEQ ID NO: 24477 - DNA, 29 bp, Gossypium hirsutum
aggccataattcatataacgtcaacaaca

SEQ ID NO: 24478 - DNA, 16 bp, Gossypium hirsutum
ccattcacgagcacat

SEQ ID NO: 24479 - DNA, 17 bp, Gossypium hirsutum
cccattcacaagcacat

SEQ ID NO: 24480 - DNA, 35 bp, Gossypium hirsutum
aatctagataccttatatggttacgactcaaatct

SEQ ID NO: 24481 - DNA, 27 bp, Gossypium hirsutum
gctaacaatgttgtcaatgctaatcga

SEQ ID NO: 24482 - DNA, 19 bp, Gossypium hirsutum
caagctgattaagttttag

SEQ ID NO: 24483 - DNA, 18 bp, Gossypium hirsutum
aagctgattaaattttag

SEQ ID NO: 24484 - DNA, 37 bp, Gossypium hirsutum
ggaaagaattttgtttgcacgtttattattaaagatt

SEQ ID NO: 24485 - DNA, 28 bp, Gossypium hirsutum
agatccgaatcgatttgatgacaagtag

SEQ ID NO: 24486 - DNA, 18 bp, Gossypium hirsutum
aaagttgtttaaattttg

SEQ ID NO: 24487 - DNA, 17 bp, Gossypium hirsutum
aagttgtttagattttg

SEQ ID NO: 24488 - DNA, 29 bp, Gossypium hirsutum
cggttaatcctaatcgaaagctcattttt

SEQ ID NO: 24489 - DNA, 25 bp, Gossypium hirsutum
gtgccaaaaggcagactaactttat

SEQ ID NO: 24490 - DNA, 25 bp, Gossypium hirsutum
aaattttgaatggttaaattatagt

SEQ ID NO: 24491 - DNA, 22 bp, Gossypium hirsutum
ttttgaatggttaaattatggt

SEQ ID NO: 24492 - DNA, 26 bp, Gossypium hirsutum
agcaactcgagaaaactaccaaatga

SEQ ID NO: 24493 - DNA, 28 bp, Gossypium hirsutum
cacaaatcgagagatacatcaaacaagt

SEQ ID NO: 24494 - DNA, 22 bp, Gossypium hirsutum
ttagatattgtctttaactttc

SEQ ID NO: 24495 - DNA, 19 bp, Gossypium hirsutum
agatattgtcttaactttc

SEQ ID NO: 24496 - DNA, 34 bp, Gossypium hirsutum
cgtgcttcaactctataaagaattttacaagttt

SEQ ID NO: 24497 - DNA, 27 bp, Gossypium hirsutum
ggtatctcatggtgctctcattttgat

SEQ ID NO: 24498 - DNA, 18 bp, Gossypium hirsutum
ctagagcaacaacgattt

SEQ ID NO: 24499 - DNA, 17 bp, Gossypium hirsutum
tagagcaacaatgattt

SEQ ID NO: 24500 - DNA, 25 bp, Gossypium hirsutum
tggcattgattttggctctatctct

SEQ ID NO: 24501 - DNA, 26 bp, Gossypium hirsutum
gtaggctgtttgtgtcatgaatgttt

SEQ ID NO: 24502 - DNA, 19 bp, Gossypium hirsutum
atttcaatgagagcccgac

SEQ ID NO: 24503 - DNA, 19 bp, Gossypium hirsutum
atttcaatgagatcccgac

SEQ ID NO: 24504 - DNA, 22 bp, Gossypium hirsutum
accaccaaggaaatgtgagcat

SEQ ID NO: 24505 - DNA, 27 bp, Gossypium hirsutum
cttacctccccagctattaaaattcca

SEQ ID NO: 24506 - DNA, 16 bp, Gossypium hirsutum
atcgatcccagcaact

SEQ ID NO: 24507 - DNA, 14 bp, Gossypium hirsutum
cgatcccggcaact

SEQ ID NO: 24508 - DNA, 25 bp, Gossypium hirsutum
cagtgatttctgataaccacaagca

SEQ ID NO: 24509 - DNA, 19 bp, Gossypium hirsutum
agagagttgcctgccagtg

SEQ ID NO: 24510 - DNA, 19 bp, Gossypium hirsutum
attgacatttctcaaataa

SEQ ID NO: 24511 - DNA, 17 bp, Gossypium hirsutum
tgacatttcacaaataa

SEQ ID NO: 24512 - DNA, 30 bp, Gossypium hirsutum
agatccatataagaggcagacatattcaca

SEQ ID NO: 24513 - DNA, 24 bp, Gossypium hirsutum
tgggtgtggtatttgggttttgat

SEQ ID NO: 24514 - DNA, 15 bp, Gossypium hirsutum
attgggccccgggct

SEQ ID NO: 24515 - DNA, 18 bp, Gossypium hirsutum
tttattgggctccgggct

SEQ ID NO: 24516 - DNA, 26 bp, Gossypium hirsutum
tgcattatagttgtagggcccaattt

SEQ ID NO: 24517 - DNA, 24 bp, Gossypium hirsutum
gacgagagcaaaatagcagcaaat

SEQ ID NO: 24518 - DNA, 18 bp, Gossypium hirsutum
acaatagtgaaaattttt

SEQ ID NO: 24519 - DNA, 18 bp, Gossypium hirsutum
acaatagtgaaatttttt

SEQ ID NO: 24520 - DNA, 25 bp, Gossypium hirsutum
ttcaacccgacccaaatttacctaa

SEQ ID NO: 24521 - DNA, 31 bp, Gossypium hirsutum
cgagtgacaagcatgtaacaatttaataaca

SEQ ID NO: 24522 - DNA, 21 bp, Gossypium hirsutum
tttttcctttttggtatattg

SEQ ID NO: 24523 - DNA, 17 bp, Gossypium hirsutum
tcctttttgggatattg

SEQ ID NO: 24524 - DNA, 29 bp, Gossypium hirsutum
cacgcttttgtcaaattcaattttttcga

SEQ ID NO: 24525 - DNA, 26 bp, Gossypium hirsutum
gcaaagctcattccttaatcccaact

SEQ ID NO: 24526 - DNA, 19 bp, Gossypium hirsutum
ctatcaacttttggtctgc

SEQ ID NO: 24527 - DNA, 20 bp, Gossypium hirsutum
cctatcaactttttgtctgc

SEQ ID NO: 24528 - DNA, 26 bp, Gossypium hirsutum
caggaccaagtttggagttattagca

SEQ ID NO: 24529 - DNA, 25 bp, Gossypium hirsutum
gccaaaaacaataaggctgagatga

SEQ ID NO: 24530 - DNA, 20 bp, Gossypium hirsutum
cataaacatcaaagaagtca

SEQ ID NO: 24531 - DNA, 19 bp, Gossypium hirsutum
ataaacatcaaaaaagtca

SEQ ID NO: 24532 - DNA, 23 bp, Gossypium hirsutum
acgtttccttgacccttgtactt

SEQ ID NO: 24533 - DNA, 26 bp, Gossypium hirsutum
gggaaagaaactatagggtggtaacg

SEQ ID NO: 24534 - DNA, 22 bp, Gossypium hirsutum
ttaattcgtgtttctaacagtt

SEQ ID NO: 24535 - DNA, 17 bp, Gossypium hirsutum
tcgtgtttccaacagtt

SEQ ID NO: 24536 - DNA, 41 bp, Gossypium hirsutum
cagaaagaatttgatgattttattcatttcaatacatacag

SEQ ID NO: 24537 - DNA, 32 bp, Gossypium hirsutum
tgtctgaaagagttgttttcaatgtaaatgag

SEQ ID NO: 24538 - DNA, 13 bp, Gossypium hirsutum
ccgcagaggagtc

SEQ ID NO: 24539 - DNA, 15 bp, Gossypium hirsutum
ttccgcataggagtc

SEQ ID NO: 24540 - DNA, 30 bp, Gossypium hirsutum
gaatactgtaagagaggctaatgacattgt

SEQ ID NO: 24541 - DNA, 42 bp, Gossypium hirsutum
acacttctaaaaaaagtgtgaattaactataaatatgtgttc

SEQ ID NO: 24542 - DNA, 23 bp, Gossypium hirsutum
tttcttcttctttttttaataat

SEQ ID NO: 24543 - DNA, 22 bp, Gossypium hirsutum
tttcttcttcttttttaataat

SEQ ID NO: 24544 - DNA, 42 bp, Gossypium hirsutum
cgacgaaattataataatatttttcataattgaccgaaatga

SEQ ID NO: 24545 - DNA, 25 bp, Gossypium hirsutum
agtctaccccttctttcaactacga

SEQ ID NO: 24546 - DNA, 22 bp, Gossypium hirsutum
cgtagtacagataatgagttaa

SEQ ID NO: 24547 - DNA, 22 bp, Gossypium hirsutum
cgtagtacagataataagttaa

SEQ ID NO: 24548 - DNA, 33 bp, Gossypium hirsutum
tggaaatttgatgtgtgcatatagagatattga

SEQ ID NO: 24549 - DNA, 33 bp, Gossypium hirsutum
aaaatggttagtctttgtatacactatcatgca

SEQ ID NO: 24550 - DNA, 23 bp, Gossypium hirsutum
acttcaaatttaattaaattcat

SEQ ID NO: 24551 - DNA, 23 bp, Gossypium hirsutum
acttcaaatttaattaaatccat

SEQ ID NO: 24552 - DNA, 32 bp, Gossypium hirsutum
cgagttcaaacttaaaagataacattgtcgaa

SEQ ID NO: 24553 - DNA, 25 bp, Gossypium hirsutum
cgcaggtcatatctcaatccctttt

SEQ ID NO: 24554 - DNA, 19 bp, Gossypium hirsutum
ttatcgtagtcagaagcta

SEQ ID NO: 24555 - DNA, 18 bp, Gossypium hirsutum
ttatcgtagtcaaagcta

SEQ ID NO: 24556 - DNA, 25 bp, Gossypium hirsutum
cgattgtgtagatatgcacggactt

SEQ ID NO: 24557 - DNA, 29 bp, Gossypium hirsutum
ttgcaatcaaatgaatgtttcccataaca

SEQ ID NO: 24558 - DNA, 20 bp, Gossypium hirsutum
aagatttaggatgggcatac

SEQ ID NO: 24559 - DNA, 21 bp, Gossypium hirsutum
aaagatttaggattggcatac

SEQ ID NO: 24560 - DNA, 29 bp, Gossypium hirsutum
attgaggaagttttattagtgtggacgat

SEQ ID NO: 24561 - DNA, 25 bp, Gossypium hirsutum
ggctaagggcgaagctagaataaat

SEQ ID NO: 24562 - DNA, 14 bp, Gossypium hirsutum
cccccttaaaatgg

SEQ ID NO: 24563 - DNA, 13 bp, Gossypium hirsutum
ccccctaaaatgg

SEQ ID NO: 24564 - DNA, 20 bp, Gossypium hirsutum
cttttccattggcggatgca

SEQ ID NO: 24565 - DNA, 25 bp, Gossypium hirsutum
tttcaagtacaagaggatggatgca

SEQ ID NO: 24566 - DNA, 16 bp, Gossypium hirsutum
cttcatacccaatttt

SEQ ID NO: 24567 - DNA, 17 bp, Gossypium hirsutum
acttcatactcaatttt

SEQ ID NO: 24568 - DNA, 30 bp, Gossypium hirsutum
gtagggagtgttacagtccattttgatatt

SEQ ID NO: 24569 - DNA, 28 bp, Gossypium hirsutum
tttacctacggctaacttcttgaatgtt

SEQ ID NO: 24570 - DNA, 17 bp, Gossypium hirsutum
cagaaatgacatttatc

SEQ ID NO: 24571 - DNA, 17 bp, Gossypium hirsutum
cagaaatgacatatatc

SEQ ID NO: 24572 - DNA, 30 bp, Gossypium hirsutum
acaatgctgtaggctcttagaatatgacta

SEQ ID NO: 24573 - DNA, 23 bp, Gossypium hirsutum
ggcaggaggtagatttccaagtg

SEQ ID NO: 24574 - DNA, 16 bp, Gossypium hirsutum
tttcagccaaggaatt

SEQ ID NO: 24575 - DNA, 14 bp, Gossypium hirsutum
tcagccagggaatt

SEQ ID NO: 24576 - DNA, 28 bp, Gossypium hirsutum
gcaatcccattttgataatgtggatctt

SEQ ID NO: 24577 - DNA, 46 bp, Gossypium hirsutum
gttgagtgatcaaaagataaatttactaataaattaatgaccttta

SEQ ID NO: 24578 - DNA, 21 bp, Gossypium hirsutum
ttgacttgagtaagtataagg

SEQ ID NO: 24579 - DNA, 18 bp, Gossypium hirsutum
acttgagtaaggataagg

SEQ ID NO: 24580 - DNA, 48 bp, Gossypium hirsutum
cgaggataatattaaaaaaataaatagcaaagttaagctaattacaaa

SEQ ID NO: 24581 - DNA, 19 bp, Gossypium hirsutum
catgtggtcagtggcggat

SEQ ID NO: 24582 - DNA, 20 bp, Gossypium hirsutum
cctcaaaacttagtgctaat

SEQ ID NO: 24583 - DNA, 20 bp, Gossypium hirsutum
cctcaaaacttaatgctaat

SEQ ID NO: 24584 - DNA, 22 bp, Gossypium hirsutum
gcgtggcctccagagtttttaa

SEQ ID NO: 24585 - DNA, 45 bp, Gossypium hirsutum
aatcgaattagaagatgaaaaaaatattaaattaaagcttattgc

SEQ ID NO: 24586 - DNA, 20 bp, Gossypium hirsutum
catagaagaaacgacataag

SEQ ID NO: 24587 - DNA, 19 bp, Gossypium hirsutum
atagaagaaacggcataag

SEQ ID NO: 24588 - DNA, 38 bp, Gossypium hirsutum
gtctcacaaaattcaatatatctcatgatttacagatc

SEQ ID NO: 24589 - DNA, 29 bp, Gossypium hirsutum
tgtgtttttgaaaaactgtgaatcttgct

SEQ ID NO: 24590 - DNA, 16 bp, Gossypium hirsutum
ctgggttcacaccaaa

SEQ ID NO: 24591 - DNA, 15 bp, Gossypium hirsutum
tgggttcacgccaaa

SEQ ID NO: 24592 - DNA, 32 bp, Gossypium hirsutum
gaaataaaccacgagtagagtacaataatgga

SEQ ID NO: 24593 - DNA, 24 bp, Gossypium hirsutum
aattgggctcacaaacgtcaaaat

SEQ ID NO: 24594 - DNA, 17 bp, Gossypium hirsutum
actcatcaaaattttca

SEQ ID NO: 24595 - DNA, 17 bp, Gossypium hirsutum
actcatcaaatttttca

SEQ ID NO: 24596 - DNA, 24 bp, Gossypium hirsutum
gggctagtaggaatagtggtttcg

SEQ ID NO: 24597 - DNA, 25 bp, Gossypium hirsutum
cttcgatcaggttcctgaaaggtaa

SEQ ID NO: 24598 - DNA, 18 bp, Gossypium hirsutum
cctaaaaactgaaccttg

SEQ ID NO: 24599 - DNA, 18 bp, Gossypium hirsutum
cctaaaaactaaaccttg

SEQ ID NO: 24600 - DNA, 25 bp, Gossypium hirsutum
actgtgcttttgacgcttaacaatt

SEQ ID NO: 24601 - DNA, 40 bp, Gossypium hirsutum
aacaaatttaaccatcaactttacatattatgtcaattca

SEQ ID NO: 24602 - DNA, 16 bp, Gossypium hirsutum
catgtcaaacaaaaat

SEQ ID NO: 24603 - DNA, 16 bp, Gossypium hirsutum
catgtcaaaaaaaaat

SEQ ID NO: 24604 - DNA, 32 bp, Gossypium hirsutum
cgacaaatttgacaaagactgtagcaatataa

SEQ ID NO: 24605 - DNA, 24 bp, Gossypium hirsutum
agtacatgcactaaaacggaccaa

SEQ ID NO: 24606 - DNA, 19 bp, Gossypium hirsutum
ccaagaattacataattag

SEQ ID NO: 24607 - DNA, 20 bp, Gossypium hirsutum
accaagaattacattattag

SEQ ID NO: 24608 - DNA, 43 bp, Gossypium hirsutum
cgatgtcaactttataaatgatggttaaatttgtaagtaataa

SEQ ID NO: 24609 - DNA, 27 bp, Gossypium hirsutum
ccctttgagtttctccaagaattctct

SEQ ID NO: 24610 - DNA, 16 bp, Gossypium hirsutum
aaggttgaagatggct

SEQ ID NO: 24611 - DNA, 18 bp, Gossypium hirsutum
agaaggttaaagatggct

SEQ ID NO: 24612 - DNA, 25 bp, Gossypium hirsutum
ggctctaatcttccctccaatgtaa

SEQ ID NO: 24613 - DNA, 46 bp, Gossypium hirsutum
cgacttaaaaacttcttaaacaattttctaagtcatttatttctta

SEQ ID NO: 24614 - DNA, 19 bp, Gossypium hirsutum
ccttgagttttatattttt

SEQ ID NO: 24615 - DNA, 18 bp, Gossypium hirsutum
ccttgagttttatttttt

SEQ ID NO: 24616 - DNA, 35 bp, Gossypium hirsutum
caattaaggcttcctttagttctcattaaaattct

SEQ ID NO: 24617 - DNA, 25 bp, Gossypium hirsutum
caaccataatggagctggaagtaga

SEQ ID NO: 24618 - DNA, 21 bp, Gossypium hirsutum
aatttgaagatatgatatttg

SEQ ID NO: 24619 - DNA, 22 bp, Gossypium hirsutum
caatttgaagatattatatttg

SEQ ID NO: 24620 - DNA, 27 bp, Gossypium hirsutum
caaccaagagaaaatccttgaggtagt

SEQ ID NO: 24621 - DNA, 31 bp, Gossypium hirsutum
aaattttagaacttttagaaccatgcgtcat

SEQ ID NO: 24622 - DNA, 18 bp, Gossypium hirsutum
attgttctagggctattg

SEQ ID NO: 24623 - DNA, 19 bp, Gossypium hirsutum
aattgttctagtgctattg

SEQ ID NO: 24624 - DNA, 31 bp, Gossypium hirsutum
cccataagattttaccatcaaaagtgtttgt

SEQ ID NO: 24625 - DNA, 30 bp, Gossypium hirsutum
agaaaaactcgtgtaagtatccttccaaaa

SEQ ID NO: 24626 - DNA, 18 bp, Gossypium hirsutum
ctcccatatttgtttttt

SEQ ID NO: 24627 - DNA, 18 bp, Gossypium hirsutum
ctcccatatttatttttt

SEQ ID NO: 24628 - DNA, 24 bp, Gossypium hirsutum
gagtgctaatcctttctcgtacgt

SEQ ID NO: 24629 - DNA, 29 bp, Gossypium hirsutum
ctaagttggataagttggaattgatggga

SEQ ID NO: 24630 - DNA, 15 bp, Gossypium hirsutum
tgagagaaaaaaaac

SEQ ID NO: 24631 - DNA, 14 bp, Gossypium hirsutum
tgagagaaaaaaac

SEQ ID NO: 24632 - DNA, 28 bp, Gossypium hirsutum
ggcgacataaatcaattctatggaagac

SEQ ID NO: 24633 - DNA, 28 bp, Gossypium hirsutum
agttaattctacataggcgatccaaagg

SEQ ID NO: 24634 - DNA, 17 bp, Gossypium hirsutum
tgcccattttatctggg

SEQ ID NO: 24635 - DNA, 18 bp, Gossypium hirsutum
atgcccattttatctagg

SEQ ID NO: 24636 - DNA, 26 bp, Gossypium hirsutum
cctgaacatagagggcaagataagaa

SEQ ID NO: 24637 - DNA, 22 bp, Gossypium hirsutum
agtgcttaccccgtttcctttt

SEQ ID NO: 24638 - DNA, 17 bp, Gossypium hirsutum
atgtgtctccgaccaaa

SEQ ID NO: 24639 - DNA, 17 bp, Gossypium hirsutum
atgtgtctccaaccaaa

SEQ ID NO: 24640 - DNA, 24 bp, Gossypium hirsutum
ccgaaatcctgaggttgatagtgt

SEQ ID NO: 24641 - DNA, 20 bp, Gossypium hirsutum
gcgaacaccacagctaacag

SEQ ID NO: 24642 - DNA, 14 bp, Gossypium hirsutum
ccatggaaaaagag

SEQ ID NO: 24643 - DNA, 14 bp, Gossypium hirsutum
accatggaaaagag

SEQ ID NO: 24644 - DNA, 24 bp, Gossypium hirsutum
ggagagacaaaatattgcgtgcaa

SEQ ID NO: 24645 - DNA, 28 bp, Gossypium hirsutum
gcatccgacttttatcaatttcaaacct

SEQ ID NO: 24646 - DNA, 23 bp, Gossypium hirsutum
atatctgcattatcttattttat

SEQ ID NO: 24647 - DNA, 25 bp, Gossypium hirsutum
atatatctgcattatattattttat

SEQ ID NO: 24648 - DNA, 25 bp, Gossypium hirsutum
tggccaacatagtggtaacttacaa

SEQ ID NO: 24649 - DNA, 21 bp, Gossypium hirsutum
tcatgttgaacctccaccgtt

SEQ ID NO: 24650 - DNA, 19 bp, Gossypium hirsutum
caattccttttaaagagtg

SEQ ID NO: 24651 - DNA, 18 bp, Gossypium hirsutum
aattccttttgaagagtg

SEQ ID NO: 24652 - DNA, 35 bp, Gossypium hirsutum
aacaacgaaagtctaaattaacttgtgaaatcttt

SEQ ID NO: 24653 - DNA, 25 bp, Gossypium hirsutum
ccaaaacaaagccagaacaaactca

SEQ ID NO: 24654 - DNA, 22 bp, Gossypium hirsutum
aagtacttgaatcaaactaaaa

SEQ ID NO: 24655 - DNA, 19 bp, Gossypium hirsutum
tacttgaatcgaactaaaa

SEQ ID NO: 24656 - DNA, 23 bp, Gossypium hirsutum
ccttgcgtgcattgttttcgtat

SEQ ID NO: 24657 - DNA, 21 bp, Gossypium hirsutum
gcgtcaacccgtctttgtttt

SEQ ID NO: 24658 - DNA, 16 bp, Gossypium hirsutum
actttgggtgcaaact

SEQ ID NO: 24659 - DNA, 16 bp, Gossypium hirsutum
actttgggtacaaact

SEQ ID NO: 24660 - DNA, 28 bp, Gossypium hirsutum
tggatggaaagaagataaaatggaacct

SEQ ID NO: 24661 - DNA, 26 bp, Gossypium hirsutum
cttcctcttcataagggcttttctgt

SEQ ID NO: 24662 - DNA, 16 bp, Gossypium hirsutum
agaagtacacaatctc

SEQ ID NO: 24663 - DNA, 18 bp, Gossypium hirsutum
aaagaagtacataatctc

SEQ ID NO: 24664 - DNA, 32 bp, Gossypium hirsutum
cattaattgttatttcaacatggttgtttggg

SEQ ID NO: 24665 - DNA, 40 bp, Gossypium hirsutum
aaatctcataaagagtgaaaattatgttctactagtcaaa

SEQ ID NO: 24666 - DNA, 23 bp, Gossypium hirsutum
agaaattagatgtaaaggtcctt

SEQ ID NO: 24667 - DNA, 21 bp, Gossypium hirsutum
aaattagatgtagaggtcctt

SEQ ID NO: 24668 - DNA, 23 bp, Gossypium hirsutum
tgtctccatgtacatccaccact

SEQ ID NO: 24669 - DNA, 26 bp, Gossypium hirsutum
gtctgttgctgaatgctcaaatatgg

SEQ ID NO: 24670 - DNA, 20 bp, Gossypium hirsutum
actagtatgaaagagatcat

SEQ ID NO: 24671 - DNA, 22 bp, Gossypium hirsutum
ttactagtatgaaaaagatcat

SEQ ID NO: 24672 - DNA, 41 bp, Gossypium hirsutum
tccctttaatttcttttatttttcatgtttctcatttcata

SEQ ID NO: 24673 - DNA, 20 bp, Gossypium hirsutum
gggatcagcttgccaacatg

SEQ ID NO: 24674 - DNA, 15 bp, Gossypium hirsutum
caagccgagcattga

SEQ ID NO: 24675 - DNA, 15 bp, Gossypium hirsutum
caagccgaacattga

SEQ ID NO: 24676 - DNA, 19 bp, Gossypium hirsutum
cgcgaacttcatcgagcaa

SEQ ID NO: 24677 - DNA, 27 bp, Gossypium hirsutum
agatttaatccgacctactgcaacttc

SEQ ID NO: 24678 - DNA, 24 bp, Gossypium hirsutum
aaaggtataggatttttttttaat

SEQ ID NO: 24679 - DNA, 23 bp, Gossypium hirsutum
aaaggtataggattttttttaat

SEQ ID NO: 24680 - DNA, 23 bp, Gossypium hirsutum
ccaccaatcctatctccgtgaag

SEQ ID NO: 24681 - DNA, 27 bp, Gossypium hirsutum
tgcttagggagaaaggatctacaatct

SEQ ID NO: 24682 - DNA, 17 bp, Gossypium hirsutum
ctatctccctgaacaac

SEQ ID NO: 24683 - DNA, 17 bp, Gossypium hirsutum
ctatctccctaaacaac

SEQ ID NO: 24684 - DNA, 26 bp, Gossypium hirsutum
gtggaataggtggaggattgtaagtc

SEQ ID NO: 24685 - DNA, 34 bp, Gossypium hirsutum
tgatccttagtagaaactttaaaaatgcgttact

SEQ ID NO: 24686 - DNA, 15 bp, Gossypium hirsutum
tcatttcgaaaaaag

SEQ ID NO: 24687 - DNA, 15 bp, Gossypium hirsutum
tcatttcggaaaaag

SEQ ID NO: 24688 - DNA, 26 bp, Gossypium hirsutum
ggagaagtagaatatcgtgccctaac

SEQ ID NO: 24689 - DNA, 25 bp, Gossypium hirsutum
gtgatttttgcgataaaggcggtaa

SEQ ID NO: 24690 - DNA, 21 bp, Gossypium hirsutum
ttgtctatcagtactcttgca

SEQ ID NO: 24691 - DNA, 17 bp, Gossypium hirsutum
ctatcagtgctcttgca

SEQ ID NO: 24692 - DNA, 24 bp, Gossypium hirsutum
gaagggcaacatgctcaatctttt

SEQ ID NO: 24693 - DNA, 24 bp, Gossypium hirsutum
ggtgttcaaacggttagtcgattg

SEQ ID NO: 24694 - DNA, 21 bp, Gossypium hirsutum
ccaaattaatcaaacttttta

SEQ ID NO: 24695 - DNA, 21 bp, Gossypium hirsutum
ccaaattaatcaaagttttta

SEQ ID NO: 24696 - DNA, 39 bp, Gossypium hirsutum
tttttgaaaaaattttgattcagttaacggttaaagaat

SEQ ID NO: 24697 - DNA, 30 bp, Gossypium hirsutum
tcgagttattctgttaactatgccaacttt

SEQ ID NO: 24698 - DNA, 25 bp, Gossypium hirsutum
tttattcaaaattttatctaatttt

SEQ ID NO: 24699 - DNA, 20 bp, Gossypium hirsutum
tcaaaattttacctaatttt

SEQ ID NO: 24700 - DNA, 25 bp, Gossypium hirsutum
ttcgctacaatctggcatacttcaa

SEQ ID NO: 24701 - DNA, 30 bp, Gossypium hirsutum
cctacaaatcttgttaacttcagacccatt

SEQ ID NO: 24702 - DNA, 20 bp, Gossypium hirsutum
tctatgcacagttatataca

SEQ ID NO: 24703 - DNA, 19 bp, Gossypium hirsutum
ctatgcacagttgtataca

SEQ ID NO: 24704 - DNA, 27 bp, Gossypium hirsutum
agacgattagcaatagttttggctaca

SEQ ID NO: 24705 - DNA, 31 bp, Gossypium hirsutum
ctgtttatactacctacatcaatcgaaagct

SEQ ID NO: 24706 - DNA, 21 bp, Gossypium hirsutum
attctttaagttaaaaaaaat

SEQ ID NO: 24707 - DNA, 20 bp, Gossypium hirsutum
attctttaagttaaaaaaat

SEQ ID NO: 24708 - DNA, 28 bp, Gossypium hirsutum
ctaatagtcagcgtcagagaagaaagtt

SEQ ID NO: 24709 - DNA, 35 bp, Gossypium hirsutum
caaactatcaatattatatcaatcaagtccctcca

SEQ ID NO: 24710 - DNA, 22 bp, Gossypium hirsutum
aaaccgttaatttccccattaa

SEQ ID NO: 24711 - DNA, 22 bp, Gossypium hirsutum
aaaccgttaattttcccattaa

SEQ ID NO: 24712 - DNA, 25 bp, Gossypium hirsutum
ggtgaacattagatcccatgtagca

SEQ ID NO: 24713 - DNA, 33 bp, Gossypium hirsutum
caaatataaggccattaatgtccatatccacta

SEQ ID NO: 24714 - DNA, 21 bp, Gossypium hirsutum
tcaatggtctaataacaatgt

SEQ ID NO: 24715 - DNA, 20 bp, Gossypium hirsutum
caatggtctaattacaatgt

SEQ ID NO: 24716 - DNA, 29 bp, Gossypium hirsutum
tgctatggcttattaaatgaaaggtcctt

SEQ ID NO: 24717 - DNA, 26 bp, Gossypium hirsutum
tgtctaaatccaaacgttcacctgaa

SEQ ID NO: 24718 - DNA, 14 bp, Gossypium hirsutum
tcgagcgggactaa

SEQ ID NO: 24719 - DNA, 14 bp, Gossypium hirsutum
tcgagcgagactaa

SEQ ID NO: 24720 - DNA, 27 bp, Gossypium hirsutum
actcaaactcattttaagcctgctcat

SEQ ID NO: 24721 - DNA, 44 bp, Gossypium hirsutum
ggacttacatatcaaggtttttattttattttatcttgacaaaa

SEQ ID NO: 24722 - DNA, 19 bp, Gossypium hirsutum
attgttcggactttgccct

SEQ ID NO: 24723 - DNA, 15 bp, Gossypium hirsutum
ttcggacgttgccct

SEQ ID NO: 24724 - DNA, 16 bp, Gossypium hirsutum
ccaccgccccaagtgt

SEQ ID NO: 24725 - DNA, 24 bp, Gossypium hirsutum
cctaaggctatatccaccgattcc

SEQ ID NO: 24726 - DNA, 19 bp, Gossypium hirsutum
tgtacatgttcttaattcg

SEQ ID NO: 24727 - DNA, 15 bp, Gossypium hirsutum
catgttctgaattcg

SEQ ID NO: 24728 - DNA, 21 bp, Gossypium hirsutum
gctcggaagaaagtcctgctt

SEQ ID NO: 24729 - DNA, 31 bp, Gossypium hirsutum
acaaaattaactaaataggccctttgactga

SEQ ID NO: 24730 - DNA, 19 bp, Gossypium hirsutum
attaaacactagcaatcaa

SEQ ID NO: 24731 - DNA, 20 bp, Gossypium hirsutum
cattaaacactaacaatcaa

SEQ ID NO: 24732 - DNA, 25 bp, Gossypium hirsutum
gatcagcaaatggtgctaacatgac

SEQ ID NO: 24733 - DNA, 24 bp, Gossypium hirsutum
ctctgccctatattcagcaacgat

SEQ ID NO: 24734 - DNA, 19 bp, Gossypium hirsutum
cctagacctagggtggtaa

SEQ ID NO: 24735 - DNA, 20 bp, Gossypium hirsutum
acctagacctagagtggtaa

SEQ ID NO: 24736 - DNA, 20 bp, Gossypium hirsutum
ggatgcgcgaaggaaggaat

SEQ ID NO: 24737 - DNA, 35 bp, Gossypium hirsutum
gtgggtgcattatttgtaaaaaaatttaagattca

SEQ ID NO: 24738 - DNA, 19 bp, Gossypium hirsutum
aaacaacttaattgggccc

SEQ ID NO: 24739 - DNA, 18 bp, Gossypium hirsutum
aacaacttatttgggccc

SEQ ID NO: 24740 - DNA, 25 bp, Gossypium hirsutum
cctaatggacccctaaaaagcgatt

SEQ ID NO: 24741 - DNA, 26 bp, Gossypium hirsutum
cacaagtccctgtcctttttgaaaat

SEQ ID NO: 24742 - DNA, 24 bp, Gossypium hirsutum
ttttagttcctatacttatattct

SEQ ID NO: 24743 - DNA, 18 bp, Gossypium hirsutum
ttcctatgcttatattct

SEQ ID NO: 24744 - DNA, 35 bp, Gossypium hirsutum
aacctgaatttcaaaagataaaaagtagagagact

SEQ ID NO: 24745 - DNA, 30 bp, Gossypium hirsutum
aggattggtgaccaaaaaatcaaaaatcaa

SEQ ID NO: 24746 - DNA, 19 bp, Gossypium hirsutum
caaacttcagtgtagtcat

SEQ ID NO: 24747 - DNA, 19 bp, Gossypium hirsutum
caaacttcaatgtagtcat

SEQ ID NO: 24748 - DNA, 36 bp, Gossypium hirsutum
ctagagaaatcagccgatatctaatataaatatggg

SEQ ID NO: 24749 - DNA, 27 bp, Gossypium hirsutum
tcgaagatatgacaagtgtccaatcac

SEQ ID NO: 24750 - DNA, 20 bp, Gossypium hirsutum
agccttcagttaatccatat

SEQ ID NO: 24751 - DNA, 18 bp, Gossypium hirsutum
ccttcagttgatccatat

SEQ ID NO: 24752 - DNA, 23 bp, Gossypium hirsutum
agccgattctatcaccttgcaat

SEQ ID NO: 24753 - DNA, 27 bp, Gossypium hirsutum
aagttagtcgaatgtttcccaggatac

SEQ ID NO: 24754 - DNA, 17 bp, Gossypium hirsutum
aacaacacaaaaatcaa

SEQ ID NO: 24755 - DNA, 17 bp, Gossypium hirsutum
aacaacacaataatcaa

SEQ ID NO: 24756 - DNA, 26 bp, Gossypium hirsutum
tgctctcaaaaagacaacgtttgttc

SEQ ID NO: 24757 - DNA, 24 bp, Gossypium hirsutum
agcagcttaaggcctcatttctag

SEQ ID NO: 24758 - DNA, 18 bp, Gossypium hirsutum
cacatatttgggcttcaa

SEQ ID NO: 24759 - DNA, 18 bp, Gossypium hirsutum
cacatatttgagcttcaa

SEQ ID NO: 24760 - DNA, 19 bp, Gossypium hirsutum
gagctgagaggagctgcat

SEQ ID NO: 24761 - DNA, 34 bp, Gossypium hirsutum
aatttacatcaaagagcaaattgatctttctgtt

SEQ ID NO: 24762 - DNA, 20 bp, Gossypium hirsutum
aataaaaattgatgaaattt

SEQ ID NO: 24763 - DNA, 16 bp, Gossypium hirsutum
aaaatggatgaaattt

SEQ ID NO: 24764 - DNA, 24 bp, Gossypium hirsutum
ccacgtgtacctcataatggtgta

SEQ ID NO: 24765 - DNA, 25 bp, Gossypium hirsutum
gcacccttatacctttggttcctat

SEQ ID NO: 24766 - DNA, 17 bp, Gossypium hirsutum
ccttgacccattatcta

SEQ ID NO: 24767 - DNA, 17 bp, Gossypium hirsutum
ccttgacccactatcta

SEQ ID NO: 24768 - DNA, 41 bp, Gossypium hirsutum
gaagaatgaactaatactatatacagtatttacctgagact

SEQ ID NO: 24769 - DNA, 28 bp, Gossypium hirsutum
cctttgtttactgcaatttatgaacgga

SEQ ID NO: 24770 - DNA, 19 bp, Gossypium hirsutum
ttgtaagttgtgacaatga

SEQ ID NO: 24771 - DNA, 18 bp, Gossypium hirsutum
tgtaagttgtggcaatga

SEQ ID NO: 24772 - DNA, 25 bp, Gossypium hirsutum
ggtagctgctttctcctccttaatt

SEQ ID NO: 24773 - DNA, 25 bp, Gossypium hirsutum
tctcaaaaccgaaatccagtgctta

SEQ ID NO: 24774 - DNA, 19 bp, Gossypium hirsutum
aaacaccttaaaagaaaca

SEQ ID NO: 24775 - DNA, 18 bp, Gossypium hirsutum
aaacaccttaaagaaaca

SEQ ID NO: 24776 - DNA, 28 bp, Gossypium hirsutum
gacgtagtttcttgtttttgagtttgga

SEQ ID NO: 24777 - DNA, 29 bp, Gossypium hirsutum
tttggttattttgtcagttatgccagttt

SEQ ID NO: 24778 - DNA, 23 bp, Gossypium hirsutum
ctaatatttatagacaaaattac

SEQ ID NO: 24779 - DNA, 25 bp, Gossypium hirsutum
atctaatatttatagataaaattac

SEQ ID NO: 24780 - DNA, 44 bp, Gossypium hirsutum
ccataaaagtatttgacattttgtcatttttactaaaaaatgaa

SEQ ID NO: 24781 - DNA, 23 bp, Gossypium hirsutum
gcaatgtgtgctagagggtgtac

SEQ ID NO: 24782 - DNA, 19 bp, Gossypium hirsutum
tcaatcaatgtagaataat

SEQ ID NO: 24783 - DNA, 18 bp, Gossypium hirsutum
caatcaatgtaaaataat

SEQ ID NO: 24784 - DNA, 25 bp, Gossypium hirsutum
cacatgtcgtggtagcttgtactaa

SEQ ID NO: 24785 - DNA, 22 bp, Gossypium hirsutum
gggaaggagggaatgccatttt

SEQ ID NO: 24786 - DNA, 23 bp, Gossypium hirsutum
tctaaattttaattgaaattttt

SEQ ID NO: 24787 - DNA, 23 bp, Gossypium hirsutum
tctaaattttaattgaagttttt

SEQ ID NO: 24788 - DNA, 53 bp, Gossypium hirsutum
ccactaataatacatccaagaattatttatataataaacaatgagaataaaag

SEQ ID NO: 24789 - DNA, 25 bp, Gossypium hirsutum
ccccatactttctcttcttggtcaa

SEQ ID NO: 24790 - DNA, 16 bp, Gossypium hirsutum
catactgacgaatatt

SEQ ID NO: 24791 - DNA, 17 bp, Gossypium hirsutum
ccatactgatgaatatt

SEQ ID NO: 24792 - DNA, 43 bp, Gossypium hirsutum
ggaagaagaatttttaagataagataagaggtaataattgagt

SEQ ID NO: 24793 - DNA, 25 bp, Gossypium hirsutum
tgcatcaataatgcgataggatggt

SEQ ID NO: 24794 - DNA, 21 bp, Gossypium hirsutum
attctttctacaacctttgct

SEQ ID NO: 24795 - DNA, 18 bp, Gossypium hirsutum
ctttctacaacatttgct

SEQ ID NO: 24796 - DNA, 43 bp, Gossypium hirsutum
caattaatttaagaaaagataaactagtaacatcctcatacag

SEQ ID NO: 24797 - DNA, 33 bp, Gossypium hirsutum
ggtatgtagcaatgaaggataaaatatcattgg

SEQ ID NO: 24798 - DNA, 17 bp, Gossypium hirsutum
ttatatgctgcatttct

SEQ ID NO: 24799 - DNA, 18 bp, Gossypium hirsutum
cttatatgctacatttct

SEQ ID NO: 24800 - DNA, 25 bp, Gossypium hirsutum
tctcttcgggatcaggtacttttct

SEQ ID NO: 24801 - DNA, 34 bp, Gossypium hirsutum
tgagtcttacttcattgttatcatattttgctct

SEQ ID NO: 24802 - DNA, 26 bp, Gossypium hirsutum
ctagaaagattaatttatctattttt

SEQ ID NO: 24803 - DNA, 26 bp, Gossypium hirsutum
ctagaaagattaatttatttattttt

SEQ ID NO: 24804 - DNA, 37 bp, Gossypium hirsutum
ccttttgagcaaatattacaaaagataaaagtaccat

SEQ ID NO: 24805 - DNA, 27 bp, Gossypium hirsutum
cctagcttcctttttcaacttcttgtt

SEQ ID NO: 24806 - DNA, 22 bp, Gossypium hirsutum
aagaaatcttttaaagttcggc

SEQ ID NO: 24807 - DNA, 21 bp, Gossypium hirsutum
agaaatcttttaaacttcggc

SEQ ID NO: 24808 - DNA, 41 bp, Gossypium hirsutum
caatctaagatttattaatataaatgccacaagtctcaatt

SEQ ID NO: 24809 - DNA, 40 bp, Gossypium hirsutum
tgtgttctaatgaaaaaatgtatactatgcttttatttgt

SEQ ID NO: 24810 - DNA, 26 bp, Gossypium hirsutum
aaatataaaagtacataaatatttct

SEQ ID NO: 24811 - DNA, 19 bp, Gossypium hirsutum
aaagtacataaagatttct

SEQ ID NO: 24812 - DNA, 31 bp, Gossypium hirsutum
tctccggaaaaaaattagctcaaaaatgaaa

SEQ ID NO: 24813 - DNA, 25 bp, Gossypium hirsutum
cattgttcgtgaactgaagatgtga

SEQ ID NO: 24814 - DNA, 18 bp, Gossypium hirsutum
catcagattttagaattt

SEQ ID NO: 24815 - DNA, 18 bp, Gossypium hirsutum
catcagattttggaattt

SEQ ID NO: 24816 - DNA, 28 bp, Gossypium hirsutum
tccggttagaaacttaactcaaaacact

SEQ ID NO: 24817 - DNA, 23 bp, Gossypium hirsutum
gttgggattttgggcaatgtttg

SEQ ID NO: 24818 - DNA, 20 bp, Gossypium hirsutum
ttaaggacagacagtgtact

SEQ ID NO: 24819 - DNA, 20 bp, Gossypium hirsutum
ttaaggacagacattgtact

SEQ ID NO: 24820 - DNA, 25 bp, Gossypium hirsutum
accgttcatcaacgtcctaaaatca

SEQ ID NO: 24821 - DNA, 25 bp, Gossypium hirsutum
cagcttacttcagacctcctatgac

SEQ ID NO: 24822 - DNA, 22 bp, Gossypium hirsutum
tgataaattataaagaaatctc

SEQ ID NO: 24823 - DNA, 18 bp, Gossypium hirsutum
aaattatgaagaaatctc

SEQ ID NO: 24824 - DNA, 25 bp, Gossypium hirsutum
ggagaaacaagggcaaaattggaaa

SEQ ID NO: 24825 - DNA, 30 bp, Gossypium hirsutum
aattttacctcatacatgttgtggttagga

SEQ ID NO: 24826 - DNA, 23 bp, Gossypium hirsutum
tttagtctataagtacggcctta

SEQ ID NO: 24827 - DNA, 23 bp, Gossypium hirsutum
tttagtctataagtacgacctta

SEQ ID NO: 24828 - DNA, 25 bp, Gossypium hirsutum
atggcaagattggctgacatattct

SEQ ID NO: 24829 - DNA, 30 bp, Gossypium hirsutum
cacacagagttaataatcacttgaaatgca

SEQ ID NO: 24830 - DNA, 15 bp, Gossypium hirsutum
ccgatcttcaaaact

SEQ ID NO: 24831 - DNA, 16 bp, Gossypium hirsutum
accgatcttcgaaact

SEQ ID NO: 24832 - DNA, 26 bp, Gossypium hirsutum
aggccatggtcttgataattcaaagt

SEQ ID NO: 24833 - DNA, 24 bp, Gossypium hirsutum
cacggtgttcaaagactaggactt

SEQ ID NO: 24834 - DNA, 18 bp, Gossypium hirsutum
aacaattctcgataaact

SEQ ID NO: 24835 - DNA, 18 bp, Gossypium hirsutum
aacaattctcaataaact

SEQ ID NO: 24836 - DNA, 29 bp, Gossypium hirsutum
cattttgtgcatgtgaattagtctctctt

SEQ ID NO: 24837 - DNA, 35 bp, Gossypium hirsutum
gtatgtcctttgtaaataactccaataattggaat

SEQ ID NO: 24838 - DNA, 21 bp, Gossypium hirsutum
accaatgatatcacccaggca

SEQ ID NO: 24839 - DNA, 19 bp, Gossypium hirsutum
caatgatatcgcccaggca

SEQ ID NO: 24840 - DNA, 43 bp, Gossypium hirsutum
atgtttaaatggtctataaatatccagaatattggttactaaa

SEQ ID NO: 24841 - DNA, 31 bp, Gossypium hirsutum
ggaaagtttccatttaagttattaggctgtt

SEQ ID NO: 24842 - DNA, 15 bp, Gossypium hirsutum
taaacagggaaggcc

SEQ ID NO: 24843 - DNA, 15 bp, Gossypium hirsutum
taaacagagaaggcc

SEQ ID NO: 24844 - DNA, 25 bp, Gossypium hirsutum
atgaagcttttaattggtgcaagca

SEQ ID NO: 24845 - DNA, 33 bp, Gossypium hirsutum
ttaaaaatccaaaaaataataccgtacgacgtt

SEQ ID NO: 24846 - DNA, 26 bp, Gossypium hirsutum
aatgggatatgatttttttttactta

SEQ ID NO: 24847 - DNA, 24 bp, Gossypium hirsutum
atgggatatgattttttttactta

SEQ ID NO: 24848 - DNA, 40 bp, Gossypium hirsutum
ttggtaagtgacacctaatattgattttaatccatattta

SEQ ID NO: 24849 - DNA, 29 bp, Gossypium hirsutum
aactttgtttgactttgactttgagttgt

SEQ ID NO: 24850 - DNA, 16 bp, Gossypium hirsutum
aacaggaagcatttca

SEQ ID NO: 24851 - DNA, 14 bp, Gossypium hirsutum
caggaagaatttca

SEQ ID NO: 24852 - DNA, 25 bp, Gossypium hirsutum
tgggatgaaaccgttaaaaccgtta

SEQ ID NO: 24853 - DNA, 30 bp, Gossypium hirsutum
ggatggatgacgagattagttatagttgag

SEQ ID NO: 24854 - DNA, 17 bp, Gossypium hirsutum
tgtagcaataaaaatgg

SEQ ID NO: 24855 - DNA, 15 bp, Gossypium hirsutum
tagcaatgaaaatgg

SEQ ID NO: 24856 - DNA, 33 bp, Gossypium hirsutum
tgtgtttgaatcaaaatatgcatctcatcattt

SEQ ID NO: 24857 - DNA, 19 bp, Gossypium hirsutum
cctccaccacctgtgttca

SEQ ID NO: 24858 - DNA, 18 bp, Gossypium hirsutum
cacacgatttatgggatg

SEQ ID NO: 24859 - DNA, 17 bp, Gossypium hirsutum
acacgatttgtgggatg

SEQ ID NO: 24860 - DNA, 25 bp, Gossypium hirsutum
gaggtggttcgatgtcattttcaat

SEQ ID NO: 24861 - DNA, 25 bp, Gossypium hirsutum
ccaagggtcaggctttctttatctg

SEQ ID NO: 24862 - DNA, 16 bp, Gossypium hirsutum
ttaagcccgtagtttc

SEQ ID NO: 24863 - DNA, 17 bp, Gossypium hirsutum
cttaagcccctagtttc

SEQ ID NO: 24864 - DNA, 21 bp, Gossypium hirsutum
cacaggagccgtccgatttaa

SEQ ID NO: 24865 - DNA, 37 bp, Gossypium hirsutum
agtaggtagtaggattaagttccaaatttatgaaaag

SEQ ID NO: 24866 - DNA, 17 bp, Gossypium hirsutum
ccatgtaggttaaaata

SEQ ID NO: 24867 - DNA, 20 bp, Gossypium hirsutum
ttaccatgtaagttaaaata

SEQ ID NO: 24868 - DNA, 29 bp, Gossypium hirsutum
tcacccaaatttatattctctcctcgaga

SEQ ID NO: 24869 - DNA, 25 bp, Gossypium hirsutum
acttcccatggaattgctgaatact

SEQ ID NO: 24870 - DNA, 17 bp, Gossypium hirsutum
ctctcaacgactgcatc

SEQ ID NO: 24871 - DNA, 17 bp, Gossypium hirsutum
ctctcaacaactgcatc

SEQ ID NO: 24872 - DNA, 33 bp, Gossypium hirsutum
tcgttattttacagggaataggatatttttggt

SEQ ID NO: 24873 - DNA, 22 bp, Gossypium hirsutum
gcagccaaccaggaattgtttc

SEQ ID NO: 24874 - DNA, 21 bp, Gossypium hirsutum
ataatatgtcggagtatttta

SEQ ID NO: 24875 - DNA, 18 bp, Gossypium hirsutum
atatgtcggactatttta

SEQ ID NO: 24876 - DNA, 25 bp, Gossypium hirsutum
agtgacaatacttcggtttcaacca

SEQ ID NO: 24877 - DNA, 29 bp, Gossypium hirsutum
ccccaattatgttatgtaacaacccgatt

SEQ ID NO: 24878 - DNA, 19 bp, Gossypium hirsutum
ctgttccatctagccccaa

SEQ ID NO: 24879 - DNA, 19 bp, Gossypium hirsutum
ctgttccatctacccccaa

SEQ ID NO: 24880 - DNA, 22 bp, Gossypium hirsutum
tcagatttgtggtcccgaaacc

SEQ ID NO: 24881 - DNA, 25 bp, Gossypium hirsutum
tgttcggaggtagtctaggaagttc

SEQ ID NO: 24882 - DNA, 15 bp, Gossypium hirsutum
ccatcaaagaatttc

SEQ ID NO: 24883 - DNA, 14 bp, Gossypium hirsutum
catcaaacaatttc

SEQ ID NO: 24884 - DNA, 21 bp, Gossypium hirsutum
tgactgtggagtcggttagga

SEQ ID NO: 24885 - DNA, 25 bp, Gossypium hirsutum
cccaatgcacctagctgttatctaa

SEQ ID NO: 24886 - DNA, 19 bp, Gossypium hirsutum
ttaaagatagtgaaattgc

SEQ ID NO: 24887 - DNA, 19 bp, Gossypium hirsutum
ttaaagataatgaaattgc

SEQ ID NO: 24888 - DNA, 25 bp, Gossypium hirsutum
tggaaagccatgagatttgatcact

SEQ ID NO: 24889 - DNA, 34 bp, Gossypium hirsutum
gatgattttgaaagatttagtctttacgtgagaa

SEQ ID NO: 24890 - DNA, 21 bp, Gossypium hirsutum
tcctaaaagtttgagacctaa

SEQ ID NO: 24891 - DNA, 19 bp, Gossypium hirsutum
ctaaaagtttgggacctaa

SEQ ID NO: 24892 - DNA, 32 bp, Gossypium hirsutum
ctcaacatgcttaaaatattaggctaaatgct

SEQ ID NO: 24893 - DNA, 21 bp, Gossypium hirsutum
tgtggtaatcatcggctgcat

SEQ ID NO: 24894 - DNA, 17 bp, Gossypium hirsutum
cctactcttcaaattat

SEQ ID NO: 24895 - DNA, 16 bp, Gossypium hirsutum
ctactcttcgaattat

SEQ ID NO: 24896 - DNA, 29 bp, Gossypium hirsutum
ggatgttagtacaagacttagggaaagag

SEQ ID NO: 24897 - DNA, 24 bp, Gossypium hirsutum
gttgcggatgattccagaagaaat

SEQ ID NO: 24898 - DNA, 19 bp, Gossypium hirsutum
cccagttttgatatgttag

SEQ ID NO: 24899 - DNA, 19 bp, Gossypium hirsutum
cccagttttgatttgttag

SEQ ID NO: 24900 - DNA, 24 bp, Gossypium hirsutum
gcttctcagtcaacacttcacctt

SEQ ID NO: 24901 - DNA, 28 bp, Gossypium hirsutum
tgcgacaacttatattagcaatcagctt

SEQ ID NO: 24902 - DNA, 19 bp, Gossypium hirsutum
acattgctctaaaagatat

SEQ ID NO: 24903 - DNA, 18 bp, Gossypium hirsutum
cattgctctaagagatat

SEQ ID NO: 24904 - DNA, 30 bp, Gossypium hirsutum
ggcttaattgcatatggctgaatagatttt

SEQ ID NO: 24905 - DNA, 30 bp, Gossypium hirsutum
ccatcatagaaaaacagatggagtctttca

SEQ ID NO: 24906 - DNA, 21 bp, Gossypium hirsutum
tcatgtaaggtatctcgaacc

SEQ ID NO: 24907 - DNA, 19 bp, Gossypium hirsutum
atgtaaggtacctcgaacc

SEQ ID NO: 24908 - DNA, 28 bp, Gossypium hirsutum
tttccctaaaattgtacgtcgtatgtga

SEQ ID NO: 24909 - DNA, 26 bp, Gossypium hirsutum
ggtgttacaaagtttcagctaaagct

SEQ ID NO: 24910 - DNA, 20 bp, Gossypium hirsutum
aaatgtactttcagagctag

SEQ ID NO: 24911 - DNA, 19 bp, Gossypium hirsutum
aatgtactttcggagctag

SEQ ID NO: 24912 - DNA, 26 bp, Gossypium hirsutum
ctttcgttgactataaaacccagcaa

SEQ ID NO: 24913 - DNA, 25 bp, Gossypium hirsutum
tccatcctatgtccctccagtttta

SEQ ID NO: 24914 - DNA, 21 bp, Gossypium hirsutum
ctgtaggttttaggcccacca

SEQ ID NO: 24915 - DNA, 21 bp, Gossypium hirsutum
ctgtaggttttagacccacca

SEQ ID NO: 24916 - DNA, 17 bp, Gossypium hirsutum
ccccggctctggtgaga

SEQ ID NO: 24917 - DNA, 26 bp, Gossypium hirsutum
ttttcggagagtaggtatgtgagact

SEQ ID NO: 24918 - DNA, 23 bp, Gossypium hirsutum
ctctagatatttatagaaaacac

SEQ ID NO: 24919 - DNA, 21 bp, Gossypium hirsutum
ctagatatttatagcaaacac

SEQ ID NO: 24920 - DNA, 20 bp, Gossypium hirsutum
cgacgcacgatttggagcta

SEQ ID NO: 24921 - DNA, 29 bp, Gossypium hirsutum
tgaacaataaatattggtgagtggcgata

SEQ ID NO: 24922 - DNA, 18 bp, Gossypium hirsutum
ctcatgttaggcttttga

SEQ ID NO: 24923 - DNA, 18 bp, Gossypium hirsutum
ctcatgttaggtttttga

SEQ ID NO: 24924 - DNA, 33 bp, Gossypium hirsutum
cccttaattgggccaccaatttaattataaaat

SEQ ID NO: 24925 - DNA, 30 bp, Gossypium hirsutum
ggatcacctaaaaacgactttaatctacga

SEQ ID NO: 24926 - DNA, 14 bp, Gossypium hirsutum
cgactcccggatcc

SEQ ID NO: 24927 - DNA, 14 bp, Gossypium hirsutum
cgactcccagatcc

SEQ ID NO: 24928 - DNA, 21 bp, Gossypium hirsutum
acgagggtgctaatccttcct

SEQ ID NO: 24929 - DNA, 26 bp, Gossypium hirsutum
gggattccctagggtgttacattatc

SEQ ID NO: 24930 - DNA, 17 bp, Gossypium hirsutum
caactccatcagagtac

SEQ ID NO: 24931 - DNA, 17 bp, Gossypium hirsutum
caactccatcggagtac

SEQ ID NO: 24932 - DNA, 27 bp, Gossypium hirsutum
tgagcagatttaaaatgcatgattgca

SEQ ID NO: 24933 - DNA, 28 bp, Gossypium hirsutum
ctcgtattcttgagaataagctcccttt

SEQ ID NO: 24934 - DNA, 17 bp, Gossypium hirsutum
ccaaataactgaatatc

SEQ ID NO: 24935 - DNA, 16 bp, Gossypium hirsutum
caaataaccgaatatc

SEQ ID NO: 24936 - DNA, 25 bp, Gossypium hirsutum
ggaaattcgagaagtcgtaccctaa

SEQ ID NO: 24937 - DNA, 14 bp, Gossypium hirsutum
cggtggcgcatggc

SEQ ID NO: 24938 - DNA, 17 bp, Gossypium hirsutum
cggtgagactccagcac

SEQ ID NO: 24939 - DNA, 16 bp, Gossypium hirsutum
cggtgagactcagcac

SEQ ID NO: 24940 - DNA, 29 bp, Gossypium hirsutum
acggcgtcatttcatattgttataaaagc

SEQ ID NO: 24941 - DNA, 39 bp, Gossypium hirsutum
tcatttgatttctcaaatctttttaatgttgaaaaagtg

SEQ ID NO: 24942 - DNA, 21 bp, Gossypium hirsutum
ctttttttttatggttaaacc

SEQ ID NO: 24943 - DNA, 20 bp, Gossypium hirsutum
cttttttttatggttaaacc

SEQ ID NO: 24944 - DNA, 33 bp, Gossypium hirsutum
gatgcaagtgaattattctcttatgaaaagaca

SEQ ID NO: 24945 - DNA, 20 bp, Gossypium hirsutum
cttgacgcaaccctctctct

SEQ ID NO: 24946 - DNA, 17 bp, Gossypium hirsutum
ccctagggatggtctta

SEQ ID NO: 24947 - DNA, 16 bp, Gossypium hirsutum
ccctagggatggtcta

SEQ ID NO: 24948 - DNA, 24 bp, Gossypium hirsutum
cactgtttagtactcggtggtctt

SEQ ID NO: 24949 - DNA, 34 bp, Gossypium hirsutum
tgaaaactctagtgtcttaaaaattccaatagct

SEQ ID NO: 24950 - DNA, 18 bp, Gossypium hirsutum
ctgactaaaacagaattg

SEQ ID NO: 24951 - DNA, 17 bp, Gossypium hirsutum
tgactaaaacggaattg

SEQ ID NO: 24952 - DNA, 22 bp, Gossypium hirsutum
cgggataggttactcgagggtt

SEQ ID NO: 24953 - DNA, 25 bp, Gossypium hirsutum
tgaagtacacgtggcattgtatgat

SEQ ID NO: 24954 - DNA, 23 bp, Gossypium hirsutum
tttgtcagttatattaattttta

SEQ ID NO: 24955 - DNA, 22 bp, Gossypium hirsutum
ttgtcagttatattagttttta

SEQ ID NO: 24956 - DNA, 35 bp, Gossypium hirsutum
tttagatactcacatgttgctatttcacttcttta

SEQ ID NO: 24957 - DNA, 40 bp, Gossypium hirsutum
acaactctatttattattcaatcccatctctttattttca

SEQ ID NO: 24958 - DNA, 17 bp, Gossypium hirsutum
acacaacactagatagc

SEQ ID NO: 24959 - DNA, 14 bp, Gossypium hirsutum
caacacgagatagc

SEQ ID NO: 24960 - DNA, 29 bp, Gossypium hirsutum
cttagaataagagcctccatggtactttt

SEQ ID NO: 24961 - DNA, 23 bp, Gossypium hirsutum
ggatggttggagatggtgtgtag

SEQ ID NO: 24962 - DNA, 24 bp, Gossypium hirsutum
acaatagatgtagattttcaatca

SEQ ID NO: 24963 - DNA, 22 bp, Gossypium hirsutum
aatagatgtagatttacaatca

SEQ ID NO: 24964 - DNA, 43 bp, Gossypium hirsutum
ctcagtgtgtaacatatcatatcatcaatagaaattaattaga

SEQ ID NO: 24965 - DNA, 24 bp, Gossypium hirsutum
cttggctcaaaacttcctggaaaa

SEQ ID NO: 24966 - DNA, 17 bp, Gossypium hirsutum
aatactcccaaatggag

SEQ ID NO: 24967 - DNA, 17 bp, Gossypium hirsutum
aatactcccagatggag

SEQ ID NO: 24968 - DNA, 27 bp, Gossypium hirsutum
gttttggtattttgacaaagggttgga

SEQ ID NO: 24969 - DNA, 25 bp, Gossypium hirsutum
ggaggaaagattcagagcttggaaa

SEQ ID NO: 24970 - DNA, 17 bp, Gossypium hirsutum
acactcacaatttattg

SEQ ID NO: 24971 - DNA, 16 bp, Gossypium hirsutum
cactcacagtttattg

SEQ ID NO: 24972 - DNA, 27 bp, Gossypium hirsutum
tgaggaggctccaatattgatcaaatc

SEQ ID NO: 24973 - DNA, 28 bp, Gossypium hirsutum
tgccctttgcctttgtccttaaattata

SEQ ID NO: 24974 - DNA, 21 bp, Gossypium hirsutum
ttaaacatcaagatggaataa

SEQ ID NO: 24975 - DNA, 22 bp, Gossypium hirsutum
attaaacatcaaaatggaataa

SEQ ID NO: 24976 - DNA, 28 bp, Gossypium hirsutum
tgataatctagaaattgtgacacgtggt

SEQ ID NO: 24977 - DNA, 31 bp, Gossypium hirsutum
ctgttgatgaattgagatttgttttggtttc

SEQ ID NO: 24978 - DNA, 17 bp, Gossypium hirsutum
acagttcgcttttgttg

SEQ ID NO: 24979 - DNA, 16 bp, Gossypium hirsutum
cagttcgctcttgttg

SEQ ID NO: 24980 - DNA, 25 bp, Gossypium hirsutum
ccactttcgttatcatcctcttgca

SEQ ID NO: 24981 - DNA, 32 bp, Gossypium hirsutum
gtccagtttcttttcttatgggttataaactc

SEQ ID NO: 24982 - DNA, 18 bp, Gossypium hirsutum
cagacgagcatcccgata

SEQ ID NO: 24983 - DNA, 18 bp, Gossypium hirsutum
cagacgagcatcctgata

SEQ ID NO: 24984 - DNA, 25 bp, Gossypium hirsutum
ggaaaccaagtttgcgacatatacg

SEQ ID NO: 24985 - DNA, 25 bp, Gossypium hirsutum
gccctagtctgtgggtcaaattata

SEQ ID NO: 24986 - DNA, 23 bp, Gossypium hirsutum
attttcaagttaatgatttagtg

SEQ ID NO: 24987 - DNA, 22 bp, Gossypium hirsutum
ttttcaagttaatcatttagtg

SEQ ID NO: 24988 - DNA, 35 bp, Gossypium hirsutum
tgaatcgaactaagacttagtcaacaataatttgt

SEQ ID NO: 24989 - DNA, 30 bp, Gossypium hirsutum
ccaaattcattgattttccttggaagttga

SEQ ID NO: 24990 - DNA, 13 bp, Gossypium hirsutum
aagaagcaagccc

SEQ ID NO: 24991 - DNA, 13 bp, Gossypium hirsutum
aagaaggaagccc

SEQ ID NO: 24992 - DNA, 30 bp, Gossypium hirsutum
aggaccaatcagataaaaacatgacagatt

SEQ ID NO: 24993 - DNA, 41 bp, Gossypium hirsutum
gagtaatttaatatccgtctttagactaaagagtaaactag

SEQ ID NO: 24994 - DNA, 19 bp, Gossypium hirsutum
tgttgtctagttgttttgt

SEQ ID NO: 24995 - DNA, 19 bp, Gossypium hirsutum
tgttgtctagttattttgt

SEQ ID NO: 24996 - DNA, 33 bp, Gossypium hirsutum
caattaaaagctgatttttatacgtcagcatga

SEQ ID NO: 24997 - DNA, 26 bp, Gossypium hirsutum
ttcctgaagtagaaaaccgatgtgtt

SEQ ID NO: 24998 - DNA, 20 bp, Gossypium hirsutum
aacttatcagaatagaactc

SEQ ID NO: 24999 - DNA, 17 bp, Gossypium hirsutum
ttatcagaacagaactc

SEQ ID NO: 25000 - DNA, 23 bp, Gossypium hirsutum
atcccttctgacttgcacagttt

SEQ ID NO: 25001 - DNA, 25 bp, Gossypium hirsutum
ggatcacgaatgtgtgtaccaattt

SEQ ID NO: 25002 - DNA, 20 bp, Gossypium hirsutum
atggtgatttttggtaatag

SEQ ID NO: 25003 - DNA, 19 bp, Gossypium hirsutum
tggtgatttttggtgatag

SEQ ID NO: 25004 - DNA, 25 bp, Gossypium hirsutum
ggtagcattacattgtcacgacaga

SEQ ID NO: 25005 - DNA, 30 bp, Gossypium hirsutum
gctcgataattacttaatcaagttcggttt

SEQ ID NO: 25006 - DNA, 14 bp, Gossypium hirsutum
agcttggaaatacc

SEQ ID NO: 25007 - DNA, 15 bp, Gossypium hirsutum
tagcttggaagtacc

SEQ ID NO: 25008 - DNA, 30 bp, Gossypium hirsutum
agctctaaatagggatgtaaatgagacact

SEQ ID NO: 25009 - DNA, 19 bp, Gossypium hirsutum
ggcatcggcaccggtatat

SEQ ID NO: 25010 - DNA, 15 bp, Gossypium hirsutum
cttacactggctccc

SEQ ID NO: 25011 - DNA, 16 bp, Gossypium hirsutum
tcttacactagctccc

SEQ ID NO: 25012 - DNA, 21 bp, Gossypium hirsutum
gctgatgccatgttccagaca

SEQ ID NO: 25013 - DNA, 26 bp, Gossypium hirsutum
agccttttgccgaattcaattaagtc

SEQ ID NO: 25014 - DNA, 15 bp, Gossypium hirsutum
ccaaatgggcaaaac

SEQ ID NO: 25015 - DNA, 14 bp, Gossypium hirsutum
caaatgcgcaaaac

SEQ ID NO: 25016 - DNA, 25 bp, Gossypium hirsutum
cccacgttttaaccaaaggaaatgg

SEQ ID NO: 25017 - DNA, 21 bp, Gossypium hirsutum
actcgaagagcttgccgaaat

SEQ ID NO: 25018 - DNA, 18 bp, Gossypium hirsutum
cacctaagcagtttgaat

SEQ ID NO: 25019 - DNA, 18 bp, Gossypium hirsutum
cacctaagcactttgaat

SEQ ID NO: 25020 - DNA, 24 bp, Gossypium hirsutum
gctgatgtccttaccaagcctatt

SEQ ID NO: 25021 - DNA, 27 bp, Gossypium hirsutum
gcaatccaattcctataaccgatcatg

SEQ ID NO: 25022 - DNA, 16 bp, Gossypium hirsutum
cggtctaggttgggca

SEQ ID NO: 25023 - DNA, 16 bp, Gossypium hirsutum
cggtctagattgggca

SEQ ID NO: 25024 - DNA, 25 bp, Gossypium hirsutum
gcttgaggttgtttctgaacttgtt

SEQ ID NO: 25025 - DNA, 28 bp, Gossypium hirsutum
aacatggagacttctgtactaagagtca

SEQ ID NO: 25026 - DNA, 21 bp, Gossypium hirsutum
ttaataaaatggttcaattac

SEQ ID NO: 25027 - DNA, 21 bp, Gossypium hirsutum
ttaataaaatggttaaattac

SEQ ID NO: 25028 - DNA, 38 bp, Gossypium hirsutum
aatgattcgttttttctttgatctaatatataggagga

SEQ ID NO: 25029 - DNA, 25 bp, Gossypium hirsutum
tggtcgttggagtggacaaaattat

SEQ ID NO: 25030 - DNA, 14 bp, Gossypium hirsutum
atcaatgaaatccc

SEQ ID NO: 25031 - DNA, 16 bp, Gossypium hirsutum
aaatcaataaaatccc

SEQ ID NO: 25032 - DNA, 34 bp, Gossypium hirsutum
gcccctgtattaaatttatattcaattaagcctt

SEQ ID NO: 25033 - DNA, 42 bp, Gossypium hirsutum
cttttgatatataaacacttactgacatgacataattaagac

SEQ ID NO: 25034 - DNA, 24 bp, Gossypium hirsutum
atttgtgaattcgatatttgaatt

SEQ ID NO: 25035 - DNA, 21 bp, Gossypium hirsutum
tgtgaattcgatatttaaatt

SEQ ID NO: 25036 - DNA, 34 bp, Gossypium hirsutum
cttcggtttaataattttattgtgtctcatgtga

SEQ ID NO: 25037 - DNA, 26 bp, Gossypium hirsutum
gtcgtcaggactggatactatccata

SEQ ID NO: 25038 - DNA, 19 bp, Gossypium hirsutum
ctattcacacttattcttg

SEQ ID NO: 25039 - DNA, 18 bp, Gossypium hirsutum
tattcacacttgttcttg

SEQ ID NO: 25040 - DNA, 25 bp, Gossypium hirsutum
ggattcactcttgatggcacttcta

SEQ ID NO: 25041 - DNA, 36 bp, Gossypium hirsutum
acaagctgtgtctgtataaccaaatctaaataatat

SEQ ID NO: 25042 - DNA, 24 bp, Gossypium hirsutum
aaaaagttaaaaatttaaaaaaaa

SEQ ID NO: 25043 - DNA, 23 bp, Gossypium hirsutum
aaaagttaaaaattttaaaaaaa

SEQ ID NO: 25044 - DNA, 30 bp, Gossypium hirsutum
gtttccttttatttcattttagcccgttca

SEQ ID NO: 25045 - DNA, 29 bp, Gossypium hirsutum
ggacaaaaagaatcacttaggtatcagga

SEQ ID NO: 25046 - DNA, 15 bp, Gossypium hirsutum
cctcatcagaactct

SEQ ID NO: 25047 - DNA, 15 bp, Gossypium hirsutum
cctcatcaaaactct

SEQ ID NO: 25048 - DNA, 23 bp, Gossypium hirsutum
gccgtccccaatattgagttttc

SEQ ID NO: 25049 - DNA, 25 bp, Gossypium hirsutum
tcccgatagcttaaattcagcagtt

SEQ ID NO: 25050 - DNA, 16 bp, Gossypium hirsutum
tttcccgaaagattgg

SEQ ID NO: 25051 - DNA, 13 bp, Gossypium hirsutum
cccgaaaaattgg

SEQ ID NO: 25052 - DNA, 25 bp, Gossypium hirsutum
ctggtcaaatgtcatctggtagtgt

SEQ ID NO: 25053 - DNA, 27 bp, Gossypium hirsutum
ctgttttggctagcttaaaggcttaaa

SEQ ID NO: 25054 - DNA, 25 bp, Gossypium hirsutum
agtgtaacttaatatatttaattcg

SEQ ID NO: 25055 - DNA, 24 bp, Gossypium hirsutum
agtgtaacttaatatatttattcg

SEQ ID NO: 25056 - DNA, 33 bp, Gossypium hirsutum
tcttcatcctatgtttttcatgttattacggat

SEQ ID NO: 25057 - DNA, 31 bp, Gossypium hirsutum
tgacactataccagtctttctagaataacca

SEQ ID NO: 25058 - DNA, 21 bp, Gossypium hirsutum
actaatacacaacagttttaa

SEQ ID NO: 25059 - DNA, 19 bp, Gossypium hirsutum
taatacacaaccgttttaa

SEQ ID NO: 25060 - DNA, 25 bp, Gossypium hirsutum
gaaccgaaaaaacccaactcatctt

SEQ ID NO: 25061 - DNA, 21 bp, Gossypium hirsutum
cccctacccgccaaattcatt

SEQ ID NO: 25062 - DNA, 20 bp, Gossypium hirsutum
ccaaaatactaacgataaat

SEQ ID NO: 25063 - DNA, 20 bp, Gossypium hirsutum
ccaaaatactaaagataaat

SEQ ID NO: 25064 - DNA, 26 bp, Gossypium hirsutum
ggtcagtattccagtagaacctcctt

SEQ ID NO: 25065 - DNA, 36 bp, Gossypium hirsutum
accagatttaagtctgttttatttatccttcatctt

SEQ ID NO: 25066 - DNA, 19 bp, Gossypium hirsutum
catcacatttaggagccat

SEQ ID NO: 25067 - DNA, 19 bp, Gossypium hirsutum
catcacatttacgagccat

SEQ ID NO: 25068 - DNA, 27 bp, Gossypium hirsutum
gaatgtcattctttggccttgaaaagt

SEQ ID NO: 25069 - DNA, 34 bp, Gossypium hirsutum
ttcctttacgttacttatgatgtacagaattgaa

SEQ ID NO: 25070 - DNA, 24 bp, Gossypium hirsutum
ttatttttaagaaggttaaaatat

SEQ ID NO: 25071 - DNA, 19 bp, Gossypium hirsutum
tttaagagggttaaaatat

SEQ ID NO: 25072 - DNA, 25 bp, Gossypium hirsutum
tcgtccccttccatttaaacctttt

SEQ ID NO: 25073 - DNA, 28 bp, Gossypium hirsutum
cgaatcaatagcaagtcaccacataatc

SEQ ID NO: 25074 - DNA, 16 bp, Gossypium hirsutum
tcttgaggagtggtcc

SEQ ID NO: 25075 - DNA, 15 bp, Gossypium hirsutum
cttgaggaatggtcc

SEQ ID NO: 25076 - DNA, 32 bp, Gossypium hirsutum
accagtttgagaaattggtattgtattaccat

SEQ ID NO: 25077 - DNA, 23 bp, Gossypium hirsutum
cacttgtctctcgtctctttgca

SEQ ID NO: 25078 - DNA, 18 bp, Gossypium hirsutum
caataaatatccaatccc

SEQ ID NO: 25079 - DNA, 16 bp, Gossypium hirsutum
ataaagatccaatccc

SEQ ID NO: 25080 - DNA, 27 bp, Gossypium hirsutum
tgggcttagaatttgagattacatgca

SEQ ID NO: 25081 - DNA, 40 bp, Gossypium hirsutum
tctcttttaaacaactcatatatagtaatgtacgaacttg

SEQ ID NO: 25082 - DNA, 25 bp, Gossypium hirsutum
aatctgctaatttatatttaatatt

SEQ ID NO: 25083 - DNA, 24 bp, Gossypium hirsutum
atctgctaatttatatttgatatt

SEQ ID NO: 25084 - DNA, 39 bp, Gossypium hirsutum
ttgatcttgattcaaccatattgataatgaaaattttga

SEQ ID NO: 25085 - DNA, 25 bp, Gossypium hirsutum
tgctgcgcataatcctaatgttact

SEQ ID NO: 25086 - DNA, 19 bp, Gossypium hirsutum
ttcagttttgtaattcatc

SEQ ID NO: 25087 - DNA, 19 bp, Gossypium hirsutum
ttcagttttgtatttcatc

SEQ ID NO: 25088 - DNA, 19 bp, Gossypium hirsutum
ccccataagcgcgtaggta

SEQ ID NO: 25089 - DNA, 21 bp, Gossypium hirsutum
ccacgtggttgtaggatgagg

SEQ ID NO: 25090 - DNA, 17 bp, Gossypium hirsutum
caagggaaaaaccattg

SEQ ID NO: 25091 - DNA, 16 bp, Gossypium hirsutum
aagggaaaagccattg

SEQ ID NO: 25092 - DNA, 27 bp, Gossypium hirsutum
gcaggatttctggtttgatttggaata

SEQ ID NO: 25093 - DNA, 25 bp, Gossypium hirsutum
tcgcacacaactggtactaattcaa

SEQ ID NO: 25094 - DNA, 20 bp, Gossypium hirsutum
tgtacttgatacgaaagtga

SEQ ID NO: 25095 - DNA, 21 bp, Gossypium hirsutum
atgtacttgataagaaagtga

SEQ ID NO: 25096 - DNA, 26 bp, Gossypium hirsutum
cagttgtgatctcgtctatgttagct

SEQ ID NO: 25097 - DNA, 35 bp, Gossypium hirsutum
ggacgagcatatgatattatttcatcttacaatgt

SEQ ID NO: 25098 - DNA, 22 bp, Gossypium hirsutum
attataagataagaaaaatttg

SEQ ID NO: 25099 - DNA, 21 bp, Gossypium hirsutum
ttataagataagaaaattttg

SEQ ID NO: 25100 - DNA, 31 bp, Gossypium hirsutum
ttccccatttcataagtatcttttaccaaca

SEQ ID NO: 25101 - DNA, 27 bp, Gossypium hirsutum
gactcaaacttcacgatcactatctca

SEQ ID NO: 25102 - DNA, 17 bp, Gossypium hirsutum
caactgaagaagatgat

SEQ ID NO: 25103 - DNA, 16 bp, Gossypium hirsutum
aactgaaggagatgat

SEQ ID NO: 25104 - DNA, 29 bp, Gossypium hirsutum
ggatttttcaagaggcaaaattcttctca

SEQ ID NO: 25105 - DNA, 26 bp, Gossypium hirsutum
ggtaagtcgattcttgctttttctgt

SEQ ID NO: 25106 - DNA, 18 bp, Gossypium hirsutum
caaagggtttaggagaac

SEQ ID NO: 25107 - DNA, 15 bp, Gossypium hirsutum
agggtttaggaaaac

SEQ ID NO: 25108 - DNA, 25 bp, Gossypium hirsutum
agaccgctcccctaaaaaaaattct

SEQ ID NO: 25109 - DNA, 26 bp, Gossypium hirsutum
aatggttctatcatgaaggacaagca

SEQ ID NO: 25110 - DNA, 14 bp, Gossypium hirsutum
acggaacacttttg

SEQ ID NO: 25111 - DNA, 14 bp, Gossypium hirsutum
acggaaaacttttg

SEQ ID NO: 25112 - DNA, 28 bp, Gossypium hirsutum
gatgaattgcctttatcaagaggtctct

SEQ ID NO: 25113 - DNA, 23 bp, Gossypium hirsutum
caagtgtcgaggtagtgttgact

SEQ ID NO: 25114 - DNA, 19 bp, Gossypium hirsutum
catggactttttagatgat

SEQ ID NO: 25115 - DNA, 19 bp, Gossypium hirsutum
catggacttttttgatgat

SEQ ID NO: 25116 - DNA, 25 bp, Gossypium hirsutum
gcatgaggttgtacagttcaaggtt

SEQ ID NO: 25117 - DNA, 31 bp, Gossypium hirsutum
tgctttaggtaacatatcatatgagagctca

SEQ ID NO: 25118 - DNA, 20 bp, Gossypium hirsutum
ctgttaacaacatcagattt

SEQ ID NO: 25119 - DNA, 19 bp, Gossypium hirsutum
tgttaacaacataagattt

SEQ ID NO: 25120 - DNA, 18 bp, Gossypium hirsutum
ggcaaagccctcttcacg

SEQ ID NO: 25121 - DNA, 27 bp, Gossypium hirsutum
gtgataactgtaagccaacaaaaccat

SEQ ID NO: 25122 - DNA, 18 bp, Gossypium hirsutum
actagcagaaaatatatc

SEQ ID NO: 25123 - DNA, 17 bp, Gossypium hirsutum
ctagcagaagatatatc

SEQ ID NO: 25124 - DNA, 22 bp, Gossypium hirsutum
ccgtgtcccatatctccttacg

SEQ ID NO: 25125 - DNA, 32 bp, Gossypium hirsutum
gactaagcgaattagctatgagatatatgtcg

SEQ ID NO: 25126 - DNA, 19 bp, Gossypium hirsutum
acctagttacgtacaacaa

SEQ ID NO: 25127 - DNA, 17 bp, Gossypium hirsutum
ctagttacggacaacaa

SEQ ID NO: 25128 - DNA, 26 bp, Gossypium hirsutum
cagcagaaaaagcattggctaaatct

SEQ ID NO: 25129 - DNA, 33 bp, Gossypium hirsutum
tgcccaaaattctaaatatgagttttgaaatgt

SEQ ID NO: 25130 - DNA, 17 bp, Gossypium hirsutum
tcgatccgttcataatg

SEQ ID NO: 25131 - DNA, 19 bp, Gossypium hirsutum
tttcgatccattcataatg

SEQ ID NO: 25132 - DNA, 42 bp, Gossypium hirsutum
gggtttcttagacaaatattaaagacaattattttcattcat

SEQ ID NO: 25133 - DNA, 21 bp, Gossypium hirsutum
cctccaccaccagtatttgct

SEQ ID NO: 25134 - DNA, 17 bp, Gossypium hirsutum
cccaaatgtggtagttg

SEQ ID NO: 25135 - DNA, 17 bp, Gossypium hirsutum
cccaaatgtgctagttg

SEQ ID NO: 25136 - DNA, 26 bp, Gossypium hirsutum
gtcaagtgcttggagatatgtcttca

SEQ ID NO: 25137 - DNA, 27 bp, Gossypium hirsutum
tgaggattgagtgtattccaaatgtgt

SEQ ID NO: 25138 - DNA, 17 bp, Gossypium hirsutum
ctcaagtcgggtcaggt

SEQ ID NO: 25139 - DNA, 17 bp, Gossypium hirsutum
ctcaagtcgagtcaggt

SEQ ID NO: 25140 - DNA, 26 bp, Gossypium hirsutum
acgtcagcttactgttacaccattaa

SEQ ID NO: 25141 - DNA, 27 bp, Gossypium hirsutum
cctggtattccatcaatttctcagcat

SEQ ID NO: 25142 - DNA, 21 bp, Gossypium hirsutum
tctctctcttctaaacttgat

SEQ ID NO: 25143 - DNA, 19 bp, Gossypium hirsutum
tctctcttctaagcttgat

SEQ ID NO: 25144 - DNA, 30 bp, Gossypium hirsutum
ggaactgagttaactttaggcttttttcat

SEQ ID NO: 25145 - DNA, 43 bp, Gossypium hirsutum
ccaacgtttcataaatataataattgaaaagtgtaaaaaactt

SEQ ID NO: 25146 - DNA, 26 bp, Gossypium hirsutum
atcgtatatataaaaaaagttaattg

SEQ ID NO: 25147 - DNA, 25 bp, Gossypium hirsutum
atcgtatatataaaaaagttaattg

SEQ ID NO: 25148 - DNA, 31 bp, Gossypium hirsutum
gtgctcaattggacaaattttcctactaatt

SEQ ID NO: 25149 - DNA, 30 bp, Gossypium hirsutum
tcagaatttgatccttatactttgcgagaa

SEQ ID NO: 25150 - DNA, 22 bp, Gossypium hirsutum
actaacaactgtactatctcat

SEQ ID NO: 25151 - DNA, 18 bp, Gossypium hirsutum
acaactgtaccatctcat

SEQ ID NO: 25152 - DNA, 32 bp, Gossypium hirsutum
acaaattagcaaaaataagctgttcaagttca

SEQ ID NO: 25153 - DNA, 22 bp, Gossypium hirsutum
gtttgccgtgaaactcattgct

SEQ ID NO: 25154 - DNA, 15 bp, Gossypium hirsutum
aagcttgtgatttct

SEQ ID NO: 25155 - DNA, 15 bp, Gossypium hirsutum
aagcttgtggtttct

SEQ ID NO: 25156 - DNA, 33 bp, Gossypium hirsutum
agtacaagttatctacccacatagatgtttaga

SEQ ID NO: 25157 - DNA, 29 bp, Gossypium hirsutum
tgaaaaaaacttaaagctgaaaacgaggt

SEQ ID NO: 25158 - DNA, 14 bp, Gossypium hirsutum
ctgaggccggaatt

SEQ ID NO: 25159 - DNA, 13 bp, Gossypium hirsutum
tgaggcaggaatt

SEQ ID NO: 25160 - DNA, 25 bp, Gossypium hirsutum
actttggtcatctagcctgttgttt

SEQ ID NO: 25161 - DNA, 42 bp, Gossypium hirsutum
gtaaatggtaggttaaaaattcttaaagaaatatacctcatg

SEQ ID NO: 25162 - DNA, 23 bp, Gossypium hirsutum
tttctatctcctctttatattaa

SEQ ID NO: 25163 - DNA, 20 bp, Gossypium hirsutum
ctatctcctccttatattaa

SEQ ID NO: 25164 - DNA, 22 bp, Gossypium hirsutum
ggcacttttcttcgccactttt

SEQ ID NO: 25165 - DNA, 30 bp, Gossypium hirsutum
gtggtaaactacttaaccaatcttgtccta

SEQ ID NO: 25166 - DNA, 19 bp, Gossypium hirsutum
tcacattaaatgaaagatg

SEQ ID NO: 25167 - DNA, 20 bp, Gossypium hirsutum
atcacattaaataaaagatg

SEQ ID NO: 25168 - DNA, 30 bp, Gossypium hirsutum
aactttgtggtatgtaagaaggatcgtaag

SEQ ID NO: 25169 - DNA, 34 bp, Gossypium hirsutum
gctaaaccagaaaatatcattctttttacaagga

SEQ ID NO: 25170 - DNA, 23 bp, Gossypium hirsutum
atttgacaaatatgaatcatgag

SEQ ID NO: 25171 - DNA, 21 bp, Gossypium hirsutum
ttgacaaatatgaatcttgag

SEQ ID NO: 25172 - DNA, 28 bp, Gossypium hirsutum
caggatggtaagtgccattcttatatct

SEQ ID NO: 25173 - DNA, 25 bp, Gossypium hirsutum
cgtgttcgaggtaagttcgtgtaat

SEQ ID NO: 25174 - DNA, 19 bp, Gossypium hirsutum
atcatacaaatgcgcaatt

SEQ ID NO: 25175 - DNA, 23 bp, Gossypium hirsutum
ttaaatcatacaaatacgcaatt

SEQ ID NO: 25176 - DNA, 33 bp, Gossypium hirsutum
gtcgtcggttatatgcttgataattatacaaaa

SEQ ID NO: 25177 - DNA, 39 bp, Gossypium hirsutum
gagtgagctagtctttatttttatttttttacagtcaaa

SEQ ID NO: 25178 - DNA, 18 bp, Gossypium hirsutum
tcactcaagttcaagtca

SEQ ID NO: 25179 - DNA, 17 bp, Gossypium hirsutum
cactcaagttaaagtca

SEQ ID NO: 25180 - DNA, 42 bp, Gossypium hirsutum
gttgtaaaataaatctaagttagtaagaaaataagaggaaca

SEQ ID NO: 25181 - DNA, 22 bp, Gossypium hirsutum
agggtccaaagatgcggaaatt

SEQ ID NO: 25182 - DNA, 16 bp, Gossypium hirsutum
atgaatggaaatgtcc

SEQ ID NO: 25183 - DNA, 15 bp, Gossypium hirsutum
tgaatggagatgtcc

SEQ ID NO: 25184 - DNA, 33 bp, Gossypium hirsutum
aggttattctttgggttaataaaatcccattga

SEQ ID NO: 25185 - DNA, 32 bp, Gossypium hirsutum
gggaatcaataatattcaaaccttagaagcca

SEQ ID NO: 25186 - DNA, 19 bp, Gossypium hirsutum
tgatctttcaaacaaatag

SEQ ID NO: 25187 - DNA, 17 bp, Gossypium hirsutum
atctttcgaacaaatag

SEQ ID NO: 25188 - DNA, 33 bp, Gossypium hirsutum
tccaaacttcacgaagtataaagatgaaattca

SEQ ID NO: 25189 - DNA, 25 bp, Gossypium hirsutum
ctggaatgcgttttttaccgttcat

SEQ ID NO: 25190 - DNA, 21 bp, Gossypium hirsutum
tttaagagagaaaggataaaa

SEQ ID NO: 25191 - DNA, 20 bp, Gossypium hirsutum
ttaagagagaaagggtaaaa

SEQ ID NO: 25192 - DNA, 45 bp, Gossypium hirsutum
ggattaaattttaaatttacaaatattacaaggactaatggcata

SEQ ID NO: 25193 - DNA, 40 bp, Gossypium hirsutum
ttggaaattacataaaatcttttaatacacatggatgaat

SEQ ID NO: 25194 - DNA, 24 bp, Gossypium hirsutum
cattagttatcattagttaaatat

SEQ ID NO: 25195 - DNA, 24 bp, Gossypium hirsutum
cattagttatcattaattaaatat

SEQ ID NO: 25196 - DNA, 28 bp, Gossypium hirsutum
aaactgtgtttgaacttgtttggattgt

SEQ ID NO: 25197 - DNA, 24 bp, Gossypium hirsutum
tcattagaggttggttgggcaaaa

SEQ ID NO: 25198 - DNA, 15 bp, Gossypium hirsutum
agatgcaaaaacacg

SEQ ID NO: 25199 - DNA, 13 bp, Gossypium hirsutum
atgcgaaaacacg

SEQ ID NO: 25200 - DNA, 22 bp, Gossypium hirsutum
gaaattggcagctacgttgagt

SEQ ID NO: 25201 - DNA, 25 bp, Gossypium hirsutum
gcggtggttacaagtgaaaacatat

SEQ ID NO: 25202 - DNA, 18 bp, Gossypium hirsutum
ccacaaccaacttttatt

SEQ ID NO: 25203 - DNA, 17 bp, Gossypium hirsutum
cacaaccaacctttatt

SEQ ID NO: 25204 - DNA, 25 bp, Gossypium hirsutum
cgctagaaaagcaaactaccaacat

SEQ ID NO: 25205 - DNA, 30 bp, Gossypium hirsutum
gtaaagctcgttgccttaataaatacaagt

SEQ ID NO: 25206 - DNA, 20 bp, Gossypium hirsutum
cccattttcttttcttttct

SEQ ID NO: 25207 - DNA, 19 bp, Gossypium hirsutum
ccattttcttttattttct

SEQ ID NO: 25208 - DNA, 24 bp, Gossypium hirsutum
caggccaaattcagacaaagcatt

SEQ ID NO: 25209 - DNA, 23 bp, Gossypium hirsutum
gcctctctcgaagtaagccaatc

SEQ ID NO: 25210 - DNA, 17 bp, Gossypium hirsutum
tgaagatcgaggagatc

SEQ ID NO: 25211 - DNA, 15 bp, Gossypium hirsutum
aagatcgagaagatc

SEQ ID NO: 25212 - DNA, 35 bp, Gossypium hirsutum
cgaattgacaaattattggatttatgaaggaatct

SEQ ID NO: 25213 - DNA, 24 bp, Gossypium hirsutum
ccaccatggaatcacatagcttga

SEQ ID NO: 25214 - DNA, 19 bp, Gossypium hirsutum
atttacacagaacaaacat

SEQ ID NO: 25215 - DNA, 18 bp, Gossypium hirsutum
tttacacagtacaaacat

SEQ ID NO: 25216 - DNA, 15 bp, Gossypium hirsutum
ccgtaccgggcggtt

SEQ ID NO: 25217 - DNA, 28 bp, Gossypium hirsutum
tgtgacattacatctccaagacataacc

SEQ ID NO: 25218 - DNA, 21 bp, Gossypium hirsutum
ctcttgataaaaaacaaatta

SEQ ID NO: 25219 - DNA, 19 bp, Gossypium hirsutum
cttgataaaaagcaaatta

SEQ ID NO: 25220 - DNA, 39 bp, Gossypium hirsutum
gttatgataagtcctacatattatgtgattgtaatgtgt

SEQ ID NO: 25221 - DNA, 18 bp, Gossypium hirsutum
gaacgcatggcttgccaa

SEQ ID NO: 25222 - DNA, 20 bp, Gossypium hirsutum
attgtcagtgataattgttt

SEQ ID NO: 25223 - DNA, 19 bp, Gossypium hirsutum
ttgtcagtgatagttgttt

SEQ ID NO: 25224 - DNA, 26 bp, Gossypium hirsutum
atacaatccctatgctcactgatgtg

SEQ ID NO: 25225 - DNA, 28 bp, Gossypium hirsutum
tggatctcgatctggagtattgaattga

SEQ ID NO: 25226 - DNA, 23 bp, Gossypium hirsutum
ctgtataatataacacaaaataa

SEQ ID NO: 25227 - DNA, 22 bp, Gossypium hirsutum
ctgtataatataacacaaataa

SEQ ID NO: 25228 - DNA, 33 bp, Gossypium hirsutum
cgtaacttgaatagatgatccaacctaatcaaa

SEQ ID NO: 25229 - DNA, 25 bp, Gossypium hirsutum
catttccaaccctcgacccttaata

SEQ ID NO: 25230 - DNA, 19 bp, Gossypium hirsutum
tgtgtatgccatatataat

SEQ ID NO: 25231 - DNA, 22 bp, Gossypium hirsutum
atttgtgtataccatatataat

SEQ ID NO: 25232 - DNA, 32 bp, Gossypium hirsutum
tgaactttgatttggtgcatatattttgtgtt

SEQ ID NO: 25233 - DNA, 25 bp, Gossypium hirsutum
tgctgcaatcgttacggttaactta

SEQ ID NO: 25234 - DNA, 19 bp, Gossypium hirsutum
ataagatgaacgaaagatt

SEQ ID NO: 25235 - DNA, 17 bp, Gossypium hirsutum
aagatgaaccaaagatt

SEQ ID NO: 25236 - DNA, 34 bp, Gossypium hirsutum
aatcaaattcatgtgtaatttggaacttaacact

SEQ ID NO: 25237 - DNA, 26 bp, Gossypium hirsutum
gtcccagcccactaaaatgatttttt

SEQ ID NO: 25238 - DNA, 26 bp, Gossypium hirsutum
ctttatcatttttaaatgattaaatt

SEQ ID NO: 25239 - DNA, 22 bp, Gossypium hirsutum
atcatttttaaaggattaaatt

SEQ ID NO: 25240 - DNA, 42 bp, Gossypium hirsutum
gaatagtgaaaatagaaatttttttagaggaagtcgaaatta

SEQ ID NO: 25241 - DNA, 48 bp, Gossypium hirsutum
attgaggttatttgaagtacttaattgaatgaaattattatttagatc

SEQ ID NO: 25242 - DNA, 16 bp, Gossypium hirsutum
aagacacacaacaatc

SEQ ID NO: 25243 - DNA, 13 bp, Gossypium hirsutum
acacgcaacaatc

SEQ ID NO: 25244 - DNA, 28 bp, Gossypium hirsutum
atccaacaccttaactttacctcgattt

SEQ ID NO: 25245 - DNA, 35 bp, Gossypium hirsutum
cacgtttaaatattagcttttataagctttcagga

SEQ ID NO: 25246 - DNA, 21 bp, Gossypium hirsutum
attttgtgtttacattttgag

SEQ ID NO: 25247 - DNA, 18 bp, Gossypium hirsutum
ttgtgtttacgttttgag

SEQ ID NO: 25248 - DNA, 31 bp, Gossypium hirsutum
cttcactaaatcagcaaaaacgaagaataca

SEQ ID NO: 25249 - DNA, 25 bp, Gossypium hirsutum
tgcacctccgtaacaacattagttt

SEQ ID NO: 25250 - DNA, 18 bp, Gossypium hirsutum
ttcaacatgtggctggag

SEQ ID NO: 25251 - DNA, 19 bp, Gossypium hirsutum
attcaacatgtagctggag

SEQ ID NO: 25252 - DNA, 42 bp, Gossypium hirsutum
caaattctggagattttcttatttctttaaattaaaaagtca

SEQ ID NO: 25253 - DNA, 35 bp, Gossypium hirsutum
gtctctcctcatttaacaattgagttatttaatcc

SEQ ID NO: 25254 - DNA, 20 bp, Gossypium hirsutum
cctttcaatttagccatttt

SEQ ID NO: 25255 - DNA, 20 bp, Gossypium hirsutum
cctttcaatttagtcatttt

SEQ ID NO: 25256 - DNA, 42 bp, Gossypium hirsutum
aattctgttagaaaatttttacatttgggtagttaattaagt

SEQ ID NO: 25257 - DNA, 25 bp, Gossypium hirsutum
attctgtcgacactacatggtcatg

SEQ ID NO: 25258 - DNA, 18 bp, Gossypium hirsutum
tgatgagccatatgtcag

SEQ ID NO: 25259 - DNA, 16 bp, Gossypium hirsutum
atgagccgtatgtcag

SEQ ID NO: 25260 - DNA, 22 bp, Gossypium hirsutum
acctaaatggctagcccttgtg

SEQ ID NO: 25261 - DNA, 36 bp, Gossypium hirsutum
attcaaccctcttaaagatgatggtatataaagttc

SEQ ID NO: 25262 - DNA, 20 bp, Gossypium hirsutum
atgatgcatagttattatgg

SEQ ID NO: 25263 - DNA, 17 bp, Gossypium hirsutum
atgcatagtgattatgg

SEQ ID NO: 25264 - DNA, 30 bp, Gossypium hirsutum
tggaccaataagagtgaattttattacgct

SEQ ID NO: 25265 - DNA, 21 bp, Gossypium hirsutum
aatccccaaaccaaccttcgt

SEQ ID NO: 25266 - DNA, 15 bp, Gossypium hirsutum
caagtggtgaagatc

SEQ ID NO: 25267 - DNA, 15 bp, Gossypium hirsutum
caagtgatgaagatc

SEQ ID NO: 25268 - DNA, 23 bp, Gossypium hirsutum
gccgcctcaggtttttattaagg

SEQ ID NO: 25269 - DNA, 25 bp, Gossypium hirsutum
tcggtttaatctcaagcaacctcaa

SEQ ID NO: 25270 - DNA, 23 bp, Gossypium hirsutum
tcaccaattataaaaaaataata

SEQ ID NO: 25271 - DNA, 21 bp, Gossypium hirsutum
caccaattataaaaaataata

SEQ ID NO: 25272 - DNA, 25 bp, Gossypium hirsutum
ggctattggcttcaacgcatatcta

SEQ ID NO: 25273 - DNA, 22 bp, Gossypium hirsutum
gcttgccttgtgctgaatcttc

SEQ ID NO: 25274 - DNA, 15 bp, Gossypium hirsutum
catcagcaccaaccg

SEQ ID NO: 25275 - DNA, 14 bp, Gossypium hirsutum
atcagcagcaaccg

SEQ ID NO: 25276 - DNA, 31 bp, Gossypium hirsutum
cgatatgaagttatttgattcctttctgcaa

SEQ ID NO: 25277 - DNA, 23 bp, Gossypium hirsutum
gaattgtctctgcacctgacagt

SEQ ID NO: 25278 - DNA, 17 bp, Gossypium hirsutum
tttgcatgtacaagttg

SEQ ID NO: 25279 - DNA, 15 bp, Gossypium hirsutum
tgcatgtaaaagttg

SEQ ID NO: 25280 - DNA, 25 bp, Gossypium hirsutum
gtcctttcatcagaatcatgttgcc

SEQ ID NO: 25281 - DNA, 25 bp, Gossypium hirsutum
catggcggattaaacatcttgtgtt

SEQ ID NO: 25282 - DNA, 21 bp, Gossypium hirsutum
ttaccattatgaagctcccac

SEQ ID NO: 25283 - DNA, 20 bp, Gossypium hirsutum
ttaccattatgaagtcccac

SEQ ID NO: 25284 - DNA, 20 bp, Gossypium hirsutum
acctctgcctgcaaggaatg

SEQ ID NO: 25285 - DNA, 32 bp, Gossypium hirsutum
catcatcttttatactcagatcgttctgttgt

SEQ ID NO: 25286 - DNA, 18 bp, Gossypium hirsutum
ccaagtcttataagaaac

SEQ ID NO: 25287 - DNA, 17 bp, Gossypium hirsutum
caagtcttctaagaaac

SEQ ID NO: 25288 - DNA, 28 bp, Gossypium hirsutum
cacgggtaaaagagaagaatagtctgat

SEQ ID NO: 25289 - DNA, 31 bp, Gossypium hirsutum
cgtccttaagttacaaaacttgatcctaagt

SEQ ID NO: 25290 - DNA, 18 bp, Gossypium hirsutum
actacgataccttttttg

SEQ ID NO: 25291 - DNA, 17 bp, Gossypium hirsutum
ctacgataccctttttg

SEQ ID NO: 25292 - DNA, 29 bp, Gossypium hirsutum
ccctttttgtacatgggaatatctccaaa

SEQ ID NO: 25293 - DNA, 26 bp, Gossypium hirsutum
aggtttcgtgtctagctaaactttga

SEQ ID NO: 25294 - DNA, 16 bp, Gossypium hirsutum
ctgacctatgaacacc

SEQ ID NO: 25295 - DNA, 15 bp, Gossypium hirsutum
tgacctctgaacacc

SEQ ID NO: 25296 - DNA, 47 bp, Gossypium hirsutum
gccatttttttaatagtatatagactagattatttcctttaatacct

SEQ ID NO: 25297 - DNA, 23 bp, Gossypium hirsutum
cttggaaaggtgcatgagattgg

SEQ ID NO: 25298 - DNA, 14 bp, Gossypium hirsutum
caccagccgtcgcc

SEQ ID NO: 25299 - DNA, 13 bp, Gossypium hirsutum
accagcagtcgcc

SEQ ID NO: 25300 - DNA, 25 bp, Gossypium hirsutum
cgacacaatggattagcctatgaga

SEQ ID NO: 25301 - DNA, 30 bp, Gossypium hirsutum
ccgattacagaaagtatctgttaggagttt

SEQ ID NO: 25302 - DNA, 18 bp, Gossypium hirsutum
ttgtcccctacactacta

SEQ ID NO: 25303 - DNA, 18 bp, Gossypium hirsutum
ttgtcccctaaactacta

SEQ ID NO: 25304 - DNA, 24 bp, Gossypium hirsutum
acgcaccattggtaggagtaaatc

SEQ ID NO: 25305 - DNA, 25 bp, Gossypium hirsutum
catggttggtcgagtttgagtatga

SEQ ID NO: 25306 - DNA, 19 bp, Gossypium hirsutum
aaagtttgccatatgccca

SEQ ID NO: 25307 - DNA, 18 bp, Gossypium hirsutum
aagtttgccatttgccca

SEQ ID NO: 25308 - DNA, 34 bp, Gossypium hirsutum
tgtatggatctaaaataggcttggattaaacttt

SEQ ID NO: 25309 - DNA, 21 bp, Gossypium hirsutum
ctcaaccgtcaaccaccattg

SEQ ID NO: 25310 - DNA, 19 bp, Gossypium hirsutum
atctctactccgtgatgaa

SEQ ID NO: 25311 - DNA, 16 bp, Gossypium hirsutum
tctactccgggatgaa

SEQ ID NO: 25312 - DNA, 24 bp, Gossypium hirsutum
caagcgaatcatgaccgatatcga

SEQ ID NO: 25313 - DNA, 28 bp, Gossypium hirsutum
ccgagctgtgaaattatcatttaaccaa

SEQ ID NO: 25314 - DNA, 14 bp, Gossypium hirsutum
cccattccatgccc

SEQ ID NO: 25315 - DNA, 13 bp, Gossypium hirsutum
ccatcccatgccc

SEQ ID NO: 25316 - DNA, 23 bp, Gossypium hirsutum
catatccacggttccaactttgc

SEQ ID NO: 25317 - DNA, 24 bp, Gossypium hirsutum
tgatggaacgcctgctataatctc

SEQ ID NO: 25318 - DNA, 22 bp, Gossypium hirsutum
taaattataccccttgaccaat

SEQ ID NO: 25319 - DNA, 18 bp, Gossypium hirsutum
ttataccccctgaccaat

SEQ ID NO: 25320 - DNA, 26 bp, Gossypium hirsutum
gccggaacacacaaaacattagataa

SEQ ID NO: 25321 - DNA, 25 bp, Gossypium hirsutum
agcctaaatctggaatggcatatgt

SEQ ID NO: 25322 - DNA, 18 bp, Gossypium hirsutum
tttacagtgacacgtctc

SEQ ID NO: 25323 - DNA, 15 bp, Gossypium hirsutum
acagtgacgcgtctc

SEQ ID NO: 25324 - DNA, 27 bp, Gossypium hirsutum
gattgcattaacacgaaacctaaacca

SEQ ID NO: 25325 - DNA, 46 bp, Gossypium hirsutum
catctaaaatcattagattataaataaatttacgttttggtcattc

SEQ ID NO: 25326 - DNA, 23 bp, Gossypium hirsutum
ttataaaacggttattaaaatat

SEQ ID NO: 25327 - DNA, 17 bp, Gossypium hirsutum
aacggttattgaaatat

SEQ ID NO: 25328 - DNA, 25 bp, Gossypium hirsutum
gttgcttggagtttgttagctagac

SEQ ID NO: 25329 - DNA, 26 bp, Gossypium hirsutum
acatgctcgattaagttacacgaact

SEQ ID NO: 25330 - DNA, 17 bp, Gossypium hirsutum
cacttgtttgcgtaaat

SEQ ID NO: 25331 - DNA, 18 bp, Gossypium hirsutum
acacttgtttgtgtaaat

SEQ ID NO: 25332 - DNA, 26 bp, Gossypium hirsutum
tcaaggaaagggaaatgtttcggatt

SEQ ID NO: 25333 - DNA, 30 bp, Gossypium hirsutum
tggcaaaatgactattttacccttagactt

SEQ ID NO: 25334 - DNA, 19 bp, Gossypium hirsutum
cctagaggcaaaatcgtaa

SEQ ID NO: 25335 - DNA, 18 bp, Gossypium hirsutum
ctagaggcaaaatcataa

SEQ ID NO: 25336 - DNA, 25 bp, Gossypium hirsutum
cagctaggcttgttaaaggaggaaa

SEQ ID NO: 25337 - DNA, 22 bp, Gossypium hirsutum
tggaatagaggctgtccggatt

SEQ ID NO: 25338 - DNA, 20 bp, Gossypium hirsutum
ttttacttgagggtttcgat

SEQ ID NO: 25339 - DNA, 20 bp, Gossypium hirsutum
cttttacttgaggtttcgat

SEQ ID NO: 25340 - DNA, 23 bp, Gossypium hirsutum
cattgctttggtgctgttgacaa

SEQ ID NO: 25341 - DNA, 25 bp, Gossypium hirsutum
gagagtcacctgggaattctttcaa

SEQ ID NO: 25342 - DNA, 20 bp, Gossypium hirsutum
atctttgacttgtgtacttt

SEQ ID NO: 25343 - DNA, 23 bp, Gossypium hirsutum
aaaatctttgacttatgtacttt

SEQ ID NO: 25344 - DNA, 24 bp, Gossypium hirsutum
tgcggccttgttttagttctaaga

SEQ ID NO: 25345 - DNA, 29 bp, Gossypium hirsutum
tggagatgaaccatatgtaaggaatgttg

SEQ ID NO: 25346 - DNA, 19 bp, Gossypium hirsutum
attgacatgtgaatcaata

SEQ ID NO: 25347 - DNA, 19 bp, Gossypium hirsutum
attgacatgtgaatcgata

SEQ ID NO: 25348 - DNA, 25 bp, Gossypium hirsutum
cgtaatcacatgatggtgaaatccg

SEQ ID NO: 25349 - DNA, 28 bp, Gossypium hirsutum
gcaaaaagaatgcaataaaggagatcga

SEQ ID NO: 25350 - DNA, 19 bp, Gossypium hirsutum
aatcgataacagataactg

SEQ ID NO: 25351 - DNA, 16 bp, Gossypium hirsutum
cgataaccgataactg

SEQ ID NO: 25352 - DNA, 24 bp, Gossypium hirsutum
gcactttcgggttcgtatacctaa

SEQ ID NO: 25353 - DNA, 25 bp, Gossypium hirsutum
gtcaggcaaacataacaggcatttt

SEQ ID NO: 25354 - DNA, 19 bp, Gossypium hirsutum
ctagtgtgctatgccgttt

SEQ ID NO: 25355 - DNA, 16 bp, Gossypium hirsutum
agtgtgctatgccttt

SEQ ID NO: 25356 - DNA, 27 bp, Gossypium hirsutum
ggtagattccatgcttcaatgtgaagt

SEQ ID NO: 25357 - DNA, 39 bp, Gossypium hirsutum
acttaagctaagttgattaccttttatttatccactaaa

SEQ ID NO: 25358 - DNA, 20 bp, Gossypium hirsutum
cgagtgtattttaatctttt

SEQ ID NO: 25359 - DNA, 20 bp, Gossypium hirsutum
cgagtgtattttagtctttt

SEQ ID NO: 25360 - DNA, 29 bp, Gossypium hirsutum
tgagtggtaaacttagtttcatgtatgca

SEQ ID NO: 25361 - DNA, 21 bp, Gossypium hirsutum
tggaagtttcgttcggttcga

SEQ ID NO: 25362 - DNA, 19 bp, Gossypium hirsutum
caagcttaaatggacttaa

SEQ ID NO: 25363 - DNA, 19 bp, Gossypium hirsutum
caagcttaaatgaacttaa

SEQ ID NO: 25364 - DNA, 27 bp, Gossypium hirsutum
tcggccctttagttaagttgtaatgtt

SEQ ID NO: 25365 - DNA, 39 bp, Gossypium hirsutum
ctttctacatatcaatattaggagaaatgctagatttga

SEQ ID NO: 25366 - DNA, 25 bp, Gossypium hirsutum
catgtttaaattaaaaaaaaagtag

SEQ ID NO: 25367 - DNA, 24 bp, Gossypium hirsutum
catgtttaaattaaaaaaaagtag

SEQ ID NO: 25368 - DNA, 42 bp, Gossypium hirsutum
ttttccaatttattgcatagaattttaattatccatccttta

SEQ ID NO: 25369 - DNA, 27 bp, Gossypium hirsutum
ctgcatacatagattgagagagaacca

SEQ ID NO: 25370 - DNA, 22 bp, Gossypium hirsutum
aaaatggtgctttttttattga

SEQ ID NO: 25371 - DNA, 19 bp, Gossypium hirsutum
atggtgctttttgtattga

SEQ ID NO: 25372 - DNA, 30 bp, Gossypium hirsutum
gcttcaacaaattaaaattgacaccctttt

SEQ ID NO: 25373 - DNA, 20 bp, Gossypium hirsutum
acgccggaacaaggttacag

SEQ ID NO: 25374 - DNA, 14 bp, Gossypium hirsutum
agtccggtaaagct

SEQ ID NO: 25375 - DNA, 16 bp, Gossypium hirsutum
taagtccagtaaagct

SEQ ID NO: 25376 - DNA, 37 bp, Gossypium hirsutum
catgattgaatttgattgatttctaaaatgaatgtga

SEQ ID NO: 25377 - DNA, 25 bp, Gossypium hirsutum
ccactgtcccatgatttagacttga

SEQ ID NO: 25378 - DNA, 23 bp, Gossypium hirsutum
ttattcatgtacattaactttgt

SEQ ID NO: 25379 - DNA, 18 bp, Gossypium hirsutum
catgtacattaaatttgt

SEQ ID NO: 25380 - DNA, 33 bp, Gossypium hirsutum
tctccaaaattaggacaaatttgctaaaattgt

SEQ ID NO: 25381 - DNA, 34 bp, Gossypium hirsutum
tcatcaaaatgtgttggaaatcaactaattttct

SEQ ID NO: 25382 - DNA, 16 bp, Gossypium hirsutum
tcagatgggattgagc

SEQ ID NO: 25383 - DNA, 17 bp, Gossypium hirsutum
ttcagatgagattgagc

SEQ ID NO: 25384 - DNA, 45 bp, Gossypium hirsutum
gttcgattgagcttaggtaaatataaaatgtattaatattgatac

SEQ ID NO: 25385 - DNA, 41 bp, Gossypium hirsutum
acaatttattcttaatttaattgtcggtccatagttaaaat

SEQ ID NO: 25386 - DNA, 23 bp, Gossypium hirsutum
ttttttgtctcaatttctaattt

SEQ ID NO: 25387 - DNA, 23 bp, Gossypium hirsutum
ttttttgtctcaatttttaattt

SEQ ID NO: 25388 - DNA, 22 bp, Gossypium hirsutum
gcgggttgatatgtcggtttga

SEQ ID NO: 25389 - DNA, 35 bp, Gossypium hirsutum
acagattatgattatctccattagtaatgggaact

SEQ ID NO: 25390 - DNA, 18 bp, Gossypium hirsutum
cccttcttctacattgtt

SEQ ID NO: 25391 - DNA, 17 bp, Gossypium hirsutum
ccttcttcttcattgtt

SEQ ID NO: 25392 - DNA, 34 bp, Gossypium hirsutum
cctagagtcttgagatacaaacatagtttacaaa

SEQ ID NO: 25393 - DNA, 27 bp, Gossypium hirsutum
gtgatagattcaaggtgatgaggagaa

SEQ ID NO: 25394 - DNA, 18 bp, Gossypium hirsutum
atacgctacatgagactt

SEQ ID NO: 25395 - DNA, 18 bp, Gossypium hirsutum
atacgctacttgagactt

SEQ ID NO: 25396 - DNA, 23 bp, Gossypium hirsutum
cagattgccaaaagcctccaaaa

SEQ ID NO: 25397 - DNA, 33 bp, Gossypium hirsutum
gtaactttttaggtgaatggtgtaatttgatgt

SEQ ID NO: 25398 - DNA, 19 bp, Gossypium hirsutum
acactcttattattttttc

SEQ ID NO: 25399 - DNA, 18 bp, Gossypium hirsutum
acactcttattatttttc

SEQ ID NO: 25400 - DNA, 35 bp, Gossypium hirsutum
acccatttcatgtactcttagtaggagtatatttt

SEQ ID NO: 25401 - DNA, 25 bp, Gossypium hirsutum
tctcttgcaatatgctccttttcgt

SEQ ID NO: 25402 - DNA, 16 bp, Gossypium hirsutum
ctaatcggcctaattg

SEQ ID NO: 25403 - DNA, 16 bp, Gossypium hirsutum
ctaatcggcccaattg

SEQ ID NO: 25404 - DNA, 27 bp, Gossypium hirsutum
tgcatgcaataagattagtggacttga

SEQ ID NO: 25405 - DNA, 25 bp, Gossypium hirsutum
tggagcaactttaagaaaggaagca

SEQ ID NO: 25406 - DNA, 20 bp, Gossypium hirsutum
atcatcttcatataacattc

SEQ ID NO: 25407 - DNA, 18 bp, Gossypium hirsutum
catcttcatagaacattc

SEQ ID NO: 25408 - DNA, 30 bp, Gossypium hirsutum
tgctcgtcatttcggataataatttcttct

SEQ ID NO: 25409 - DNA, 35 bp, Gossypium hirsutum
acgttaacataagtgattaaaacgtaacatttcaa

SEQ ID NO: 25410 - DNA, 22 bp, Gossypium hirsutum
ttttttaatagtacgagttttt

SEQ ID NO: 25411 - DNA, 22 bp, Gossypium hirsutum
ttttttaataatacgagttttt

SEQ ID NO: 25412 - DNA, 42 bp, Gossypium hirsutum
tttaaggtatatttgatgttggttttactgattatagagatt

SEQ ID NO: 25413 - DNA, 24 bp, Gossypium hirsutum
cggctcatctttcaatctgattcc

SEQ ID NO: 25414 - DNA, 14 bp, Gossypium hirsutum
ctcgggaagactct

SEQ ID NO: 25415 - DNA, 14 bp, Gossypium hirsutum
ctcgggatgactct

SEQ ID NO: 25416 - DNA, 26 bp, Gossypium hirsutum
ctaagatttcccacataccccttgtt

SEQ ID NO: 25417 - DNA, 29 bp, Gossypium hirsutum
ttgttggaagttagaaatttttgttggct

SEQ ID NO: 25418 - DNA, 20 bp, Gossypium hirsutum
ttctaatttgacagtaaagc

SEQ ID NO: 25419 - DNA, 20 bp, Gossypium hirsutum
ttctaatttgaaagtaaagc

SEQ ID NO: 25420 - DNA, 23 bp, Gossypium hirsutum
acccaccagtatctaccatggat

SEQ ID NO: 25421 - DNA, 30 bp, Gossypium hirsutum
cttacctaacatgtccataattgtccatca

SEQ ID NO: 25422 - DNA, 21 bp, Gossypium hirsutum
catgtcaaatttactatttat

SEQ ID NO: 25423 - DNA, 20 bp, Gossypium hirsutum
atgtcaaatttaccatttat

SEQ ID NO: 25424 - DNA, 23 bp, Gossypium hirsutum
gcacctacttggcttggctttta

SEQ ID NO: 25425 - DNA, 35 bp, Gossypium hirsutum; identical to SEQ ID NO: 21001

SEQ ID NO: 25426 - DNA, 17 bp, Gossypium hirsutum
cgagttattcgaattat

SEQ ID NO: 25427 - DNA, 18 bp, Gossypium hirsutum
tcgagttatttgaattat

SEQ ID NO: 25428 - DNA, 24 bp, Gossypium hirsutum
tgggaccattttcctttccctttt

SEQ ID NO: 25429 - DNA, 20 bp, Gossypium hirsutum
ctgagatggaggatcgcgaa

SEQ ID NO: 25430 - DNA, 17 bp, Gossypium hirsutum
tctctttcccgttcttg

SEQ ID NO: 25431 - DNA, 17 bp, Gossypium hirsutum
tctctttccccttcttg

SEQ ID NO: 25432 - DNA, 25 bp, Gossypium hirsutum
acgatcagctctttgttttctctgt

SEQ ID NO: 25433 - DNA, 34 bp, Gossypium hirsutum
caaattcttttatccatttaccgttatcttccaa

SEQ ID NO: 25434 - DNA, 21 bp, Gossypium hirsutum
ttagttatgatccgaagtaat

SEQ ID NO: 25435 - DNA, 21 bp, Gossypium hirsutum
ttagttatgatccaaagtaat

SEQ ID NO: 25436 - DNA, 27 bp, Gossypium hirsutum
gtgtccaaatataccaatcgagcctaa

SEQ ID NO: 25437 - DNA, 35 bp, Gossypium hirsutum
cgaaatagactatgaatgagtttgttaaatgttga

SEQ ID NO: 25438 - DNA, 13 bp, Gossypium hirsutum
aactgggaaattc

SEQ ID NO: 25439 - DNA, 15 bp, Gossypium hirsutum
tcaactaggaaattc

SEQ ID NO: 25440 - DNA, 27 bp, Gossypium hirsutum
tgttctcacaatggatctttcgtatca

SEQ ID NO: 25441 - DNA, 27 bp, Gossypium hirsutum
gacgagattaacatatcgaagctgaga

SEQ ID NO: 25442 - DNA, 15 bp, Gossypium hirsutum
ttttggacagaaatc

SEQ ID NO: 25443 - DNA, 15 bp, Gossypium hirsutum
ttttggaaagaaatc

SEQ ID NO: 25444 - DNA, 24 bp, Gossypium hirsutum
tcaagtcacagtcccaacaatgag

SEQ ID NO: 25445 - DNA, 39 bp, Gossypium hirsutum
tctatatcaaattttatcccactaatcaattaaccatca

SEQ ID NO: 25446 - DNA, 19 bp, Gossypium hirsutum
attttgttgccgatggtat

SEQ ID NO: 25447 - DNA, 19 bp, Gossypium hirsutum
attttgttgccgttggtat

SEQ ID NO: 25448 - DNA, 25 bp, Gossypium hirsutum
cacaccaattcgcaaacatagttga

SEQ ID NO: 25449 - DNA, 21 bp, Gossypium hirsutum
gcacggtttagacctgctcat

SEQ ID NO: 25450 - DNA, 16 bp, Gossypium hirsutum
caaagtgggaagattt

SEQ ID NO: 25451 - DNA, 15 bp, Gossypium hirsutum
aaagtgggaggattt

SEQ ID NO: 25452 - DNA, 19 bp, Gossypium hirsutum
ccgaggcctgacctgtttt

SEQ ID NO: 25453 - DNA, 18 bp, Gossypium hirsutum
tggaagggcgtgattgca

SEQ ID NO: 25454 - DNA, 17 bp, Gossypium hirsutum
tcatcaggaataacctc

SEQ ID NO: 25455 - DNA, 15 bp, Gossypium hirsutum
atcaggaagaacctc

SEQ ID NO: 25456 - DNA, 22 bp, Gossypium hirsutum
gcgtggccttaaatcagagtgt

SEQ ID NO: 25457 - DNA, 29 bp, Gossypium hirsutum
agtaagctcattttattccaatgcgatct

SEQ ID NO: 25458 - DNA, 20 bp, Gossypium hirsutum
aagctcagctaacttatcaa

SEQ ID NO: 25459 - DNA, 17 bp, Gossypium hirsutum
ctcagctaacatatcaa

SEQ ID NO: 25460 - DNA, 25 bp, Gossypium hirsutum
gacaatggtacactatgcagtctca

SEQ ID NO: 25461 - DNA, 35 bp, Gossypium hirsutum
caaattttttattttttggtacctctcatgtttgt

SEQ ID NO: 25462 - DNA, 18 bp, Gossypium hirsutum
aatgcaatgtactttaac

SEQ ID NO: 25463 - DNA, 17 bp, Gossypium hirsutum
atgcaatgtattttaac

SEQ ID NO: 25464 - DNA, 33 bp, Gossypium hirsutum
cataaaaatttaccaatgagtgttggatgtagt

SEQ ID NO: 25465 - DNA, 25 bp, Gossypium hirsutum
ccattttgccaacaaacgtatgagt

SEQ ID NO: 25466 - DNA, 22 bp, Gossypium hirsutum
ttattggaattacgagtactgt

SEQ ID NO: 25467 - DNA, 22 bp, Gossypium hirsutum
ttattggaattacgactactgt

SEQ ID NO: 25468 - DNA, 35 bp, Gossypium hirsutum
ccattcctactaaactagaaattatatccacacaa

SEQ ID NO: 25469 - DNA, 35 bp, Gossypium hirsutum
ctccatttgcaaagatcctatatattagcaatttt

SEQ ID NO: 25470 - DNA, 21 bp, Gossypium hirsutum
ctgtatagtttcagggcatat

SEQ ID NO: 25471 - DNA, 21 bp, Gossypium hirsutum
ctgtatagtttcaggacatat

SEQ ID NO: 25472 - DNA, 30 bp, Gossypium hirsutum
cccaaaacaactcaaacctaatatgtacag

SEQ ID NO: 25473 - DNA, 35 bp, Gossypium hirsutum
agggttcaaagattaaaataccaaattcaacaatc

SEQ ID NO: 25474 - DNA, 18 bp, Gossypium hirsutum
cctttgaccaataagcaa

SEQ ID NO: 25475 - DNA, 16 bp, Gossypium hirsutum
tttgaccaacaagcaa

SEQ ID NO: 25476 - DNA, 30 bp, Gossypium hirsutum
ccaaagtatatggtgataagtctggaaaca

SEQ ID NO: 25477 - DNA, 27 bp, Gossypium hirsutum
accctattccgaccgtatgaaattttt

SEQ ID NO: 25478 - DNA, 25 bp, Gossypium hirsutum
tcattaattttgttactattttgtt

SEQ ID NO: 25479 - DNA, 24 bp, Gossypium hirsutum
cattaattttgttactattttatt

SEQ ID NO: 25480 - DNA, 48 bp, Gossypium hirsutum
gctatcattaatatgattactatttcagatgtatttatttgttaagtt

SEQ ID NO: 25481 - DNA, 42 bp, Gossypium hirsutum
tgctaaatatacatgataatttttcctaatctctgaattctc

SEQ ID NO: 25482 - DNA, 16 bp, Gossypium hirsutum
agagaggagaatttag

SEQ ID NO: 25483 - DNA, 17 bp, Gossypium hirsutum
aagagagaagaatttag

SEQ ID NO: 25484 - DNA, 31 bp, Gossypium hirsutum
acggaacaaaattaagagtaaaggaagaaga

SEQ ID NO: 25485 - DNA, 26 bp, Gossypium hirsutum
tcaactcgattaagcaacgaatgagt

SEQ ID NO: 25486 - DNA, 19 bp, Gossypium hirsutum
caaaagaaattaagaattt

SEQ ID NO: 25487 - DNA, 18 bp, Gossypium hirsutum
aaaagaaattgagaattt

SEQ ID NO: 25488 - DNA, 44 bp, Gossypium hirsutum
aggtatcaatggaaataactaaacaataacaaaagaataatttt

SEQ ID NO: 25489 - DNA, 29 bp, Gossypium hirsutum
ccagcattgctttttctttctttttttct

SEQ ID NO: 25490 - DNA, 19 bp, Gossypium hirsutum
accaaactataaaaaatta

SEQ ID NO: 25491 - DNA, 19 bp, Gossypium hirsutum
accaaactataagaaatta

SEQ ID NO: 25492 - DNA, 36 bp, Gossypium hirsutum
gctaacgtaaaatttaaaacacccaaaaatttaaga

SEQ ID NO: 25493 - DNA, 33 bp, Gossypium hirsutum
acgaaactttaatactaacttattaacgctcca

SEQ ID NO: 25494 - DNA, 17 bp, Gossypium hirsutum
cctcgtttttcgattct

SEQ ID NO: 25495 - DNA, 17 bp, Gossypium hirsutum
cctcgttttttgattct

SEQ ID NO: 25496 - DNA, 43 bp, Gossypium hirsutum
gggaaaaaaaatttaaaatagtgaatagcgtactaaaaataaa

SEQ ID NO: 25497 - DNA, 26 bp, Gossypium hirsutum
tgggtatgccttgttttcttctttct

SEQ ID NO: 25498 - DNA, 16 bp, Gossypium hirsutum
ttcaccagcctttcat

SEQ ID NO: 25499 - DNA, 14 bp, Gossypium hirsutum
caccaggctttcat

SEQ ID NO: 25500 - DNA, 29 bp, Gossypium hirsutum
cccaacttcaaaatttatggacaatcaca

SEQ ID NO: 25501 - DNA, 25 bp, Gossypium hirsutum
catgttggttcttgatcttggcaat

SEQ ID NO: 25502 - DNA, 22 bp, Gossypium hirsutum
aaatctcgatagaatctaaatt

SEQ ID NO: 25503 - DNA, 19 bp, Gossypium hirsutum
tctcgatagaatccaaatt

SEQ ID NO: 25504 - DNA, 24 bp, Gossypium hirsutum
ccgttcgatcctgcttaagtaaca

SEQ ID NO: 25505 - DNA, 36 bp, Gossypium hirsutum
agtttttattggttaatttagttactctgcaatgtt

SEQ ID NO: 25506 - DNA, 16 bp, Gossypium hirsutum
agcctgatcgacccca

SEQ ID NO: 25507 - DNA, 14 bp, Gossypium hirsutum
cctgaccgacccca

SEQ ID NO: 25508 - DNA, 28 bp, Gossypium hirsutum
tggcagatatttaagcactcgttaaaga

SEQ ID NO: 25509 - DNA, 23 bp, Gossypium hirsutum
tgagccttgaaagccactgaaaa

SEQ ID NO: 25510 - DNA, 25 bp, Gossypium hirsutum
cctgatttatatactatacaattag

SEQ ID NO: 25511 - DNA, 24 bp, Gossypium hirsutum
ctgatttatatactatagaattag

SEQ ID NO: 25512 - DNA, 35 bp, Gossypium hirsutum
ggaaaagttgttgcaataagtcatttgattttatc

SEQ ID NO: 25513 - DNA, 24 bp, Gossypium hirsutum
ggatcctcaatgtatgcgcatcaa

SEQ ID NO: 25514 - DNA, 23 bp, Gossypium hirsutum
catacacatatatcgtatctaat

SEQ ID NO: 25515 - DNA, 20 bp, Gossypium hirsutum
acacatatatcgtgtctaat

SEQ ID NO: 25516 - DNA, 25 bp, Gossypium hirsutum
ccatcgatgtgggatccttgaatta

SEQ ID NO: 25517 - DNA, 30 bp, Gossypium hirsutum
cgctcttcactttcacataatcaagtatca

SEQ ID NO: 25518 - DNA, 19 bp, Gossypium hirsutum
tctctttagctccattcta

SEQ ID NO: 25519 - DNA, 17 bp, Gossypium hirsutum
tctttagctgcattcta

SEQ ID NO: 25520 - DNA, 31 bp, Gossypium hirsutum
gtgatctaagttatcagcagtcactaaagaa

SEQ ID NO: 25521 - DNA, 25 bp, Gossypium hirsutum
gtctggctacaaaatcaaagtgctt

SEQ ID NO: 25522 - DNA, 13 bp, Gossypium hirsutum
cccgctcataaat

SEQ ID NO: 25523 - DNA, 14 bp, Gossypium hirsutum
ccccgttcataaat

SEQ ID NO: 25524 - DNA, 31 bp, Gossypium hirsutum
acctatgcaaattgtaagagttcattttgtg

SEQ ID NO: 25525 - DNA, 29 bp, Gossypium hirsutum
cccaatggcctttttcttattatcttcac

SEQ ID NO: 25526 - DNA, 16 bp, Gossypium hirsutum
tcggcagatgtaaaga

SEQ ID NO: 25527 - DNA, 15 bp, Gossypium hirsutum
cggcagatgcaaaga

SEQ ID NO: 25528 - DNA, 25 bp, Gossypium hirsutum
aagacatcgatcgaaccattagcat

SEQ ID NO: 25529 - DNA, 38 bp, Gossypium hirsutum
gtatctctaatgtagaccataatctaagactagttcat

SEQ ID NO: 25530 - DNA, 19 bp, Gossypium hirsutum
caacttttgaggttatgac

SEQ ID NO: 25531 - DNA, 18 bp, Gossypium hirsutum
aacttttgaggatatgac

SEQ ID NO: 25532 - DNA, 21 bp, Gossypium hirsutum
gaccacattagggacctgagc

SEQ ID NO: 25533 - DNA, 27 bp, Gossypium hirsutum
gagtgtccttgaaccatatttgtacct

SEQ ID NO: 25534 - DNA, 19 bp, Gossypium hirsutum
ccttccaatagttccaaac

SEQ ID NO: 25535 - DNA, 18 bp, Gossypium hirsutum
cttccaatagctccaaac

SEQ ID NO: 25536 - DNA, 32 bp, Gossypium hirsutum
tgtaaaattaatgcttccaacacctaaaaact

SEQ ID NO: 25537 - DNA, 20 bp, Gossypium hirsutum
agaacgtggcgcttttaggt

SEQ ID NO: 25538 - DNA, 14 bp, Gossypium hirsutum
tcggtcggttaacc

SEQ ID NO: 25539 - DNA, 14 bp, Gossypium hirsutum
tcggtcagttaacc

SEQ ID NO: 25540 - DNA, 28 bp, Gossypium hirsutum
tttttacctctgaccgatttaaccgaat

SEQ ID NO: 25541 - DNA, 30 bp, Gossypium hirsutum
ggcttgtgattttctacaggaaaaaaacta

SEQ ID NO: 25542 - DNA, 16 bp, Gossypium hirsutum
attacggccccaggcc

SEQ ID NO: 25543 - DNA, 15 bp, Gossypium hirsutum
ttacgcccccaggcc

SEQ ID NO: 25544 - DNA, 24 bp, Gossypium hirsutum
tgtctctgcagttttcccattgaa

SEQ ID NO: 25545 - DNA, 28 bp, Gossypium hirsutum
gagtgtcagttttcattgttcaattgga

SEQ ID NO: 25546 - DNA, 22 bp, Gossypium hirsutum
cacgaggtttatataatgttat

SEQ ID NO: 25547 - DNA, 22 bp, Gossypium hirsutum
cacgaggtttatatagtgttat

SEQ ID NO: 25548 - DNA, 26 bp, Gossypium hirsutum
ccaaaaatgtgctaagcatgggataa

SEQ ID NO: 25549 - DNA, 27 bp, Gossypium hirsutum
gcggatatatatacggtcttgccctta

SEQ ID NO: 25550 - DNA, 19 bp, Gossypium hirsutum
caacgatcctttacttcat

SEQ ID NO: 25551 - DNA, 19 bp, Gossypium hirsutum
caacgatccttttcttcat

SEQ ID NO: 25552 - DNA, 25 bp, Gossypium hirsutum
gtcccttttgaagagttcgtgagat

SEQ ID NO: 25553 - DNA, 29 bp, Gossypium hirsutum
gggccttgtgtaattaaaccaaaatttga

SEQ ID NO: 25554 - DNA, 15 bp, Gossypium hirsutum
tcaacctaaaatttg

SEQ ID NO: 25555 - DNA, 13 bp, Gossypium hirsutum
aacccaaaatttg

SEQ ID NO: 25556 - DNA, 23 bp, Gossypium hirsutum
aaaccatccaaatggaggaccaa

SEQ ID NO: 25557 - DNA, 36 bp, Gossypium hirsutum
ccttgtattaagagttggattctactttgttcttta

SEQ ID NO: 25558 - DNA, 24 bp, Gossypium hirsutum
ctctttgatctaatatataaggac

SEQ ID NO: 25559 - DNA, 21 bp, Gossypium hirsutum
tttgatctaatagataaggac

SEQ ID NO: 25560 - DNA, 37 bp, Gossypium hirsutum
ggtacatggataagtttttattagtagaattggatga

SEQ ID NO: 25561 - DNA, 25 bp, Gossypium hirsutum
gctgttaactaacaatgtgcatcgt

SEQ ID NO: 25562 - DNA, 19 bp, Gossypium hirsutum
caaattgatcaagaatgat

SEQ ID NO: 25563 - DNA, 18 bp, Gossypium hirsutum
aaattgatcaacaatgat

SEQ ID NO: 25564 - DNA, 35 bp, Gossypium hirsutum
aaaaaatacttaaatcagattcaaaaaacagcacg

SEQ ID NO: 25565 - DNA, 29 bp, Gossypium hirsutum
tttgtcccctctattaataaactgccaaa

SEQ ID NO: 25566 - DNA, 19 bp, Gossypium hirsutum
catttgctctttgatctaa

SEQ ID NO: 25567 - DNA, 19 bp, Gossypium hirsutum
catttgctctttaatctaa

SEQ ID NO: 25568 - DNA, 30 bp, Gossypium hirsutum
gctagcatacaaggattgactttaacagta

SEQ ID NO: 25569 - DNA, 41 bp, Gossypium hirsutum
ggactttagttatgatttgaaaattacattttcatttgaat

SEQ ID NO: 25570 - DNA, 21 bp, Gossypium hirsutum
acagtatatatcgtatatctc

SEQ ID NO: 25571 - DNA, 19 bp, Gossypium hirsutum
cagtatatatcgtaatctc

SEQ ID NO: 25572 - DNA, 43 bp, Gossypium hirsutum
actaaaaattaatgttaaaagctaacgtaactgatgaaataat

SEQ ID NO: 25573 - DNA, 25 bp, Gossypium hirsutum
gtgggtttctgatttgggtgaattt

SEQ ID NO: 25574 - DNA, 15 bp, Gossypium hirsutum
ccaacccaaacaaaa

SEQ ID NO: 25575 - DNA, 15 bp, Gossypium hirsutum
ccaaccaaaacaaaa

SEQ ID NO: 25576 - DNA, 43 bp, Gossypium hirsutum
aataagaaaaaaatcattttttaatgactcaattaaagagacg

SEQ ID NO: 25577 - DNA, 33 bp, Gossypium hirsutum
cttttatttgctgcttttcaaaattgataagga

SEQ ID NO: 25578 - DNA, 21 bp, Gossypium hirsutum
aaaattggtccttttcaaaat

SEQ ID NO: 25579 - DNA, 18 bp, Gossypium hirsutum
attggtccttctcaaaat

SEQ ID NO: 25580 - DNA, 20 bp, Gossypium hirsutum
ctccaccccctctcatttgg

SEQ ID NO: 25581 - DNA, 25 bp, Gossypium hirsutum
aattgatgttaagtggtgcttctgc

SEQ ID NO: 25582 - DNA, 16 bp, Gossypium hirsutum
acgtctcaaatccgtg

SEQ ID NO: 25583 - DNA, 16 bp, Gossypium hirsutum
acgtctcaagtccgtg

SEQ ID NO: 25584 - DNA, 27 bp, Gossypium hirsutum
ggttgccatttaaccttttatgctcat

SEQ ID NO: 25585 - DNA, 25 bp, Gossypium hirsutum
gtagagctagacatggagggactaa

SEQ ID NO: 25586 - DNA, 16 bp, Gossypium hirsutum
tcgccactaaccaatt

SEQ ID NO: 25587 - DNA, 16 bp, Gossypium hirsutum
tcgccactatccaatt

SEQ ID NO: 25588 - DNA, 21 bp, Gossypium hirsutum
cgataggtggctaaccaacct

SEQ ID NO: 25589 - DNA, 18 bp, Gossypium hirsutum
cgacggagacgggttagg

SEQ ID NO: 25590 - DNA, 16 bp, Gossypium hirsutum
cgctcgtaagttgtgt

SEQ ID NO: 25591 - DNA, 16 bp, Gossypium hirsutum
cgctcgtaggttgtgt

SEQ ID NO: 25592 - DNA, 28 bp, Gossypium hirsutum
cgaactgtaaattttatccgaggcttct

SEQ ID NO: 25593 - DNA, 30 bp, Gossypium hirsutum
ccattgcttcaacataggctttaatatgat

SEQ ID NO: 25594 - DNA, 14 bp, Gossypium hirsutum
atggcgggtaaatt

SEQ ID NO: 25595 - DNA, 15 bp, Gossypium hirsutum
catggcaggtaaatt

SEQ ID NO: 25596 - DNA, 25 bp, Gossypium hirsutum
ccaaaataaattggcccaacatgga

SEQ ID NO: 25597 - DNA, 44 bp, Gossypium hirsutum
tttgtgtttaactaatattgttgttgtcctaataatttagaatt

SEQ ID NO: 25598 - DNA, 19 bp, Gossypium hirsutum
ttggacaaaaagattttta

SEQ ID NO: 25599 - DNA, 19 bp, Gossypium hirsutum
ttggacaaaaagtttttta

SEQ ID NO: 25600 - DNA, 46 bp, Gossypium hirsutum
cttaaataatgttcaaagttatttattaaatttgagttagtccaag

SEQ ID NO: 25601 - DNA, 25 bp, Gossypium hirsutum
cgcacatatcacatcttttctgtca

SEQ ID NO: 25602 - DNA, 15 bp, Gossypium hirsutum
tcacagacgaaggca

SEQ ID NO: 25603 - DNA, 14 bp, Gossypium hirsutum
tcacagagaaggca

SEQ ID NO: 25604 - DNA, 32 bp, Gossypium hirsutum
aagtacaaattagttggaacaatagatttgcg

SEQ ID NO: 25605 - DNA, 25 bp, Gossypium hirsutum
gtagatggcatggatatggtgttga

SEQ ID NO: 25606 - DNA, 18 bp, Gossypium hirsutum
attcctctagtgaagaat

SEQ ID NO: 25607 - DNA, 19 bp, Gossypium hirsutum
aattcctctaatgaagaat

SEQ ID NO: 25608 - DNA, 26 bp, Gossypium hirsutum
atgaggaattcagtatagccccctat

SEQ ID NO: 25609 - DNA, 27 bp, Gossypium hirsutum
ccaccttagtggtgtaaaatactgtca

SEQ ID NO: 25610 - DNA, 20 bp, Gossypium hirsutum
taagcatttgcttctctcat

SEQ ID NO: 25611 - DNA, 16 bp, Gossypium hirsutum
catttgctgctctcat

SEQ ID NO: 25612 - DNA, 27 bp, Gossypium hirsutum
gttgaagaacctaatctctcaggatga

SEQ ID NO: 25613 - DNA, 28 bp, Gossypium hirsutum
gcttttgagcttaaccatctttgattgt

SEQ ID NO: 25614 - DNA, 14 bp, Gossypium hirsutum
cacactcaaaatct

SEQ ID NO: 25615 - DNA, 15 bp, Gossypium hirsutum
ccacacttaaaatct

SEQ ID NO: 25616 - DNA, 25 bp, Gossypium hirsutum
ggttgaaatgaaactcaggcagaaa

SEQ ID NO: 25617 - DNA, 24 bp, Gossypium hirsutum
cctcccttgatcctgatagttgga

SEQ ID NO: 25618 - DNA, 19 bp, Gossypium hirsutum
caccaatttacatctatcg

SEQ ID NO: 25619 - DNA, 18 bp, Gossypium hirsutum
accaatttacaactatcg

SEQ ID NO: 25620 - DNA, 33 bp, Gossypium hirsutum
acaaagcgcaccctacatgttatatatattaaa

SEQ ID NO: 25621 - DNA, 27 bp, Gossypium hirsutum
ctgcttggtttaatggagcttttaagg

SEQ ID NO: 25622 - DNA, 16 bp, Gossypium hirsutum
aacgatctggatcctt

SEQ ID NO: 25623 - DNA, 14 bp, Gossypium hirsutum
cgatctgcatcctt

SEQ ID NO: 25624 - DNA, 24 bp, Gossypium hirsutum
cgcttaagaaccccagcattcata

SEQ ID NO: 25625 - DNA, 25 bp, Gossypium hirsutum
gtctcgtgtccaaaatttcatgcta

SEQ ID NO: 25626 - DNA, 16 bp, Gossypium hirsutum
ctcgattatcaacccc

SEQ ID NO: 25627 - DNA, 15 bp, Gossypium hirsutum
tcgattatgaacccc

SEQ ID NO: 25628 - DNA, 21 bp, Gossypium hirsutum
aagcgatgtctcctgccattt

SEQ ID NO: 25629 - DNA, 30 bp, Gossypium hirsutum
tgtgcttatgattagtggagtttatgaaca

SEQ ID NO: 25630 - DNA, 16 bp, Gossypium hirsutum
ttcatgtgagaatatg

SEQ ID NO: 25631 - DNA, 15 bp, Gossypium hirsutum
tcatgtgggaatatg

SEQ ID NO: 25632 - DNA, 27 bp, Gossypium hirsutum
ggtaccaaatcgtgcttaatgttatgg

SEQ ID NO: 25633 - DNA, 25 bp, Gossypium hirsutum
ggctattcttgagtggaaacaacct

SEQ ID NO: 25634 - DNA, 21 bp, Gossypium hirsutum
aaatgtttttgagattcggag

SEQ ID NO: 25635 - DNA, 19 bp, Gossypium hirsutum
atgtttttgaggttcggag

SEQ ID NO: 25636 - DNA, 22 bp, Gossypium hirsutum
aatacctcgccagacctaggaa

SEQ ID NO: 25637 - DNA, 24 bp, Gossypium hirsutum
tccctgcaataccacttgaacatc

SEQ ID NO: 25638 - DNA, 16 bp, Gossypium hirsutum
aatgtgttgtaaaagc

SEQ ID NO: 25639 - DNA, 16 bp, Gossypium hirsutum
aatgtgttgtgaaagc

SEQ ID NO: 25640 - DNA, 28 bp, Gossypium hirsutum
ggtgtaggaacgatatatgacattgcat

SEQ ID NO: 25641 - DNA, 32 bp, Gossypium hirsutum
ctgagttggacctagattttgaaatagaaagt

SEQ ID NO: 25642 - DNA, 20 bp, Gossypium hirsutum
aagtataaggactaaatatc

SEQ ID NO: 25643 - DNA, 20 bp, Gossypium hirsutum
aagtataatgactaaatatc

SEQ ID NO: 25644 - DNA, 35 bp, Gossypium hirsutum
ggttaaaatatgctataagtctctgtactcttctc

SEQ ID NO: 25645 - DNA, 25 bp, Gossypium hirsutum
catgcatttggcagtaaagggttat

SEQ ID NO: 25646 - DNA, 15 bp, Gossypium hirsutum
ctttctgccaaactt

SEQ ID NO: 25647 - DNA, 16 bp, Gossypium hirsutum
actttctgtcaaactt

SEQ ID NO: 25648 - DNA, 26 bp, Gossypium hirsutum
cacaagaaacccaattgaagatggat

SEQ ID NO: 25649 - DNA, 20 bp, Gossypium hirsutum
cacccctcacccgtattcaa

SEQ ID NO: 25650 - DNA, 20 bp, Gossypium hirsutum
aaatgtatgtgaaaagtatg

SEQ ID NO: 25651 - DNA, 23 bp, Gossypium hirsutum
attaaatgtatgtaaaaagtatg

SEQ ID NO: 25652 - DNA, 31 bp, Gossypium hirsutum
ctcgtattagggacaaattgattgagattga

SEQ ID NO: 25653 - DNA, 23 bp, Gossypium hirsutum
tggagctaagatggcaaaagtgt

SEQ ID NO: 25654 - DNA, 16 bp, Gossypium hirsutum
ctgggcttgtatgcac

SEQ ID NO: 25655 - DNA, 17 bp, Gossypium hirsutum
tctgggcttttatgcac

SEQ ID NO: 25656 - DNA, 27 bp, Gossypium hirsutum
cacttctactatgatggagctttgtct

SEQ ID NO: 25657 - DNA, 32 bp, Gossypium hirsutum
ttgcaagtaaatactgatcatttcctagttga

SEQ ID NO: 25658 - DNA, 14 bp, Gossypium hirsutum
ctgagcccgcccat

SEQ ID NO: 25659 - DNA, 14 bp, Gossypium hirsutum
ctgagccagcccat

SEQ ID NO: 25660 - DNA, 25 bp, Gossypium hirsutum
ttgaatccttgatgcatgcttgaag

SEQ ID NO: 25661 - DNA, 43 bp, Gossypium hirsutum
caactctaaaataaataaaaatttgtatttttggctaatccaa

SEQ ID NO: 25662 - DNA, 21 bp, Gossypium hirsutum
cgtaacattatgagtgtagtc

SEQ ID NO: 25663 - DNA, 21 bp, Gossypium hirsutum
cgtaacattatgaatgtagtc

SEQ ID NO: 25664 - DNA, 35 bp, Gossypium hirsutum
acattaagaatcaaatctcaacaaaaagtcaatca

SEQ ID NO: 25665 - DNA, 35 bp, Gossypium hirsutum
ggaaaagaatttcttattttccccaataaatctgt

SEQ ID NO: 25666 - DNA, 20 bp, Gossypium hirsutum
atgacaaacaaataaattta

SEQ ID NO: 25667 - DNA, 17 bp, Gossypium hirsutum
acaaacaaacaaattta

SEQ ID NO: 25668 - DNA, 29 bp, Gossypium hirsutum
atggcataattttgtgttaaaccaagtgt

SEQ ID NO: 25669 - DNA, 32 bp, Gossypium hirsutum
aagtggtttgatatgagattatccttggaaaa

SEQ ID NO: 25670 - DNA, 21 bp, Gossypium hirsutum
ctaagatttacaagaaaataa

SEQ ID NO: 25671 - DNA, 20 bp, Gossypium hirsutum
ctaagatttacaagaaataa

SEQ ID NO: 25672 - DNA, 25 bp, Gossypium hirsutum
tcttagtccctccatccaattttgc

SEQ ID NO: 25673 - DNA, 25 bp, Gossypium hirsutum
cggcgagtaaaaagacacaaaaagt

SEQ ID NO: 25674 - DNA, 21 bp, Gossypium hirsutum
aagaaaagcaaagattataca

SEQ ID NO: 25675 - DNA, 21 bp, Gossypium hirsutum
aagaaaagcaaagattgtaca

SEQ ID NO: 25676 - DNA, 33 bp, Gossypium hirsutum
cgccacaagcttatgatcttttaatttttatgt

SEQ ID NO: 25677 - DNA, 19 bp, Gossypium hirsutum
cctaccactgtcccatcgg

SEQ ID NO: 25678 - DNA, 18 bp, Gossypium hirsutum
ctactagtctcaaacacg

SEQ ID NO: 25679 - DNA, 18 bp, Gossypium hirsutum
ctactagtctcgaacacg

SEQ ID NO: 25680 - DNA, 44 bp, Gossypium hirsutum
gattaaaatatactttgatagatttttccaaaagagcataaaag

SEQ ID NO: 25681 - DNA, 35 bp, Gossypium hirsutum
aaattcttgatttgatgagaagtagaactatccaa

SEQ ID NO: 25682 - DNA, 20 bp, Gossypium hirsutum
aatgaaacactaacactatc

SEQ ID NO: 25683 - DNA, 18 bp, Gossypium hirsutum
tgaaacactaacgctatc

SEQ ID NO: 25684 - DNA, 23 bp, Gossypium hirsutum
tgcactcaagtgcatcttcaaca

SEQ ID NO: 25685 - DNA, 25 bp, Gossypium hirsutum
ccccttgtattcaccattgttttgg

SEQ ID NO: 25686 - DNA, 20 bp, Gossypium hirsutum
tcacacattatacgcataat

SEQ ID NO: 25687 - DNA, 19 bp, Gossypium hirsutum
cacacattatacacataat

SEQ ID NO: 25688 - DNA, 25 bp, Gossypium hirsutum
gcatggcatatgtatacggtgagat

SEQ ID NO: 25689 - DNA, 19 bp, Gossypium hirsutum
catggcacgccagtatgtc

SEQ ID NO: 25690 - DNA, 19 bp, Gossypium hirsutum
cagaagaaatgacgctacg

SEQ ID NO: 25691 - DNA, 19 bp, Gossypium hirsutum
cagaagaaatgacactacg

SEQ ID NO: 25692 - DNA, 23 bp, Gossypium hirsutum
gctcgatccacatggagatatgg

SEQ ID NO: 25693 - DNA, 26 bp, Gossypium hirsutum
gctagtgcttgttcatacttctggat

SEQ ID NO: 25694 - DNA, 22 bp, Gossypium hirsutum
caagtactgaatatgcatacaa

SEQ ID NO: 25695 - DNA, 21 bp, Gossypium hirsutum
aagtactgaatatgcgtacaa

SEQ ID NO: 25696 - DNA, 24 bp, Gossypium hirsutum
cattcccccacctcaaaacaaaaa

SEQ ID NO: 25697 - DNA, 23 bp, Gossypium hirsutum
cgatgatgctggatccctcttag

SEQ ID NO: 25698 - DNA, 19 bp, Gossypium hirsutum
atagcacatatgaagctgt

SEQ ID NO: 25699 - DNA, 21 bp, Gossypium hirsutum
atatagcacatataaagctgt

SEQ ID NO: 25700 - DNA, 30 bp, Gossypium hirsutum
catttcaactaactactacaaccaatcacc

SEQ ID NO: 25701 - DNA, 25 bp, Gossypium hirsutum
ccaaagcatgtctggagaatcttct

SEQ ID NO: 25702 - DNA, 17 bp, Gossypium hirsutum
cttttcttcggctgctc

SEQ ID NO: 25703 - DNA, 17 bp, Gossypium hirsutum
cttttcttcgactgctc

SEQ ID NO: 25704 - DNA, 22 bp, Gossypium hirsutum
gtcggttggagaatgacttggt

SEQ ID NO: 25705 - DNA, 25 bp, Gossypium hirsutum
cttcgcatcaaaaggttcagtgttt

SEQ ID NO: 25706 - DNA, 21 bp, Gossypium hirsutum
ctaaacaatttttgcctttac

SEQ ID NO: 25707 - DNA, 21 bp, Gossypium hirsutum
ctaaacaatttttgactttac

SEQ ID NO: 25708 - DNA, 24 bp, Gossypium hirsutum
ccaagcacctaccccaaattactt

SEQ ID NO: 25709 - DNA, 25 bp, Gossypium hirsutum
gaggcttcgacacccctaaaatata

SEQ ID NO: 25710 - DNA, 18 bp, Gossypium hirsutum
ttagaggatgtcaaaata

SEQ ID NO: 25711 - DNA, 14 bp, Gossypium hirsutum
aggaggtcaaaata

SEQ ID NO: 25712 - DNA, 23 bp, Gossypium hirsutum
cctcccccactgacttctaaaaa

SEQ ID NO: 25713 - DNA, 40 bp, Gossypium hirsutum
gttggttttattttttttcatcaagctattaacttttttg

SEQ ID NO: 25714 - DNA, 21 bp, Gossypium hirsutum
ccgactttataaaaaatcatt

SEQ ID NO: 25715 - DNA, 22 bp, Gossypium hirsutum
tccgactttataaaatatcatt

SEQ ID NO: 25716 - DNA, 28 bp, Gossypium hirsutum
attatttgaagggctaaagagggttgaa

SEQ ID NO: 25717 - DNA, 24 bp, Gossypium hirsutum
acgagatatgggatttggtgcatt

SEQ ID NO: 25718 - DNA, 23 bp, Gossypium hirsutum
cgttagaataaattttgcaccac

SEQ ID NO: 25719 - DNA, 24 bp, Gossypium hirsutum
ccgttagaataaatttttcaccac

SEQ ID NO: 25720 - DNA, 27 bp, Gossypium hirsutum
gatcctttagggcaacatagaatccat

SEQ ID NO: 25721 - DNA, 27 bp, Gossypium hirsutum
aattgtggtaccagaagtcttgaagtt

SEQ ID NO: 25722 - DNA, 16 bp, Gossypium hirsutum
cagaggcaccccacct

SEQ ID NO: 25723 - DNA, 16 bp, Gossypium hirsutum
cagaggcaccctacct

SEQ ID NO: 25724 - DNA, 24 bp, Gossypium hirsutum
acagcaaatgcaccttctaaacct

SEQ ID NO: 25725 - DNA, 25 bp, Gossypium hirsutum
ccatgccacatcaacaatcattaca

SEQ ID NO: 25726 - DNA, 13 bp, Gossypium hirsutum
atcccggaattct

SEQ ID NO: 25727 - DNA, 16 bp, Gossypium hirsutum
tttatcccagaattct

SEQ ID NO: 25728 - DNA, 22 bp, Gossypium hirsutum
aaagacgagacgaactgcaagt

SEQ ID NO: 25729 - DNA, 28 bp, Gossypium hirsutum
gcatttctgaaatgaatatcggtccatt

SEQ ID NO: 25730 - DNA, 20 bp, Gossypium hirsutum
atctaccatgttaatgattt

SEQ ID NO: 25731 - DNA, 18 bp, Gossypium hirsutum
ctaccatgttgatgattt

SEQ ID NO: 25732 - DNA, 27 bp, Gossypium hirsutum
ctggttgcaagttgataaaacatacgt

SEQ ID NO: 25733 - DNA, 23 bp, Gossypium hirsutum
tgtttctgcagattcgtcatccc

SEQ ID NO: 25734 - DNA, 17 bp, Gossypium hirsutum
ccgaatcctctgtttta

SEQ ID NO: 25735 - DNA, 16 bp, Gossypium hirsutum
cgaatcctcagtttta

SEQ ID NO: 25736 - DNA, 30 bp, Gossypium hirsutum
catcgagtttcgtaaaaacttacatttcct

SEQ ID NO: 25737 - DNA, 23 bp, Gossypium hirsutum
agagggaagagtgcacttaagga

SEQ ID NO: 25738 - DNA, 13 bp, Gossypium hirsutum
ctggtcgatcctc

SEQ ID NO: 25739 - DNA, 13 bp, Gossypium hirsutum
ctggtcgagcctc

SEQ ID NO: 25740 - DNA, 29 bp, Gossypium hirsutum
tccaaagaccatcaatgttaggaaaaaga

SEQ ID NO: 25741 - DNA, 27 bp, Gossypium hirsutum
ggttaaatacattacgtcaccgttcag

SEQ ID NO: 25742 - DNA, 19 bp, Gossypium hirsutum
tctgagaatctgtttcgtg

SEQ ID NO: 25743 - DNA, 19 bp, Gossypium hirsutum
tctgagaatctatttcgtg

SEQ ID NO: 25744 - DNA, 32 bp, Gossypium hirsutum
gaatcagcagcaagaaaaaaaaagaaaaaaga

SEQ ID NO: 25745 - DNA, 25 bp, Gossypium hirsutum
ggttgttccttttgctgctttagaa

SEQ ID NO: 25746 - DNA, 21 bp, Gossypium hirsutum
ttagaaatgatgtacattgtc

SEQ ID NO: 25747 - DNA, 15 bp, Gossypium hirsutum
atgatgtgcattgtc

SEQ ID NO: 25748 - DNA, 25 bp, Gossypium hirsutum
gggaatcacagttcgtacctacaaa

SEQ ID NO: 25749 - DNA, 25 bp, Gossypium hirsutum
ctcaagtaatggaaactgcttcgtt

SEQ ID NO: 25750 - DNA, 17 bp, Gossypium hirsutum
cagttcacctgtgaatg

SEQ ID NO: 25751 - DNA, 16 bp, Gossypium hirsutum
cagttcaccgtgaatg

SEQ ID NO: 25752 - DNA, 34 bp, Gossypium hirsutum
cagccatccaaacaattatttttaagtctaaagt

SEQ ID NO: 25753 - DNA, 29 bp, Gossypium hirsutum
gcgtgattgagatgtctaatctaatctgt

SEQ ID NO: 25754 - DNA, 16 bp, Gossypium hirsutum
caccacaagtaattta

SEQ ID NO: 25755 - DNA, 17 bp, Gossypium hirsutum
tcaccacaaataattta

SEQ ID NO: 25756 - DNA, 30 bp, Gossypium hirsutum
gcaaacaaattgggtacaaaatgatcacta

SEQ ID NO: 25757 - DNA, 25 bp, Gossypium hirsutum
cagccctaaaaacggaattcattgt

SEQ ID NO: 25758 - DNA, 21 bp, Gossypium hirsutum
aaattatcatggagtactttt

SEQ ID NO: 25759 - DNA, 19 bp, Gossypium hirsutum
attatcatggagtcctttt

SEQ ID NO: 25760 - DNA, 33 bp, Gossypium hirsutum
caatttactctttgatctaacgtacatggacta

SEQ ID NO: 25761 - DNA, 28 bp, Gossypium hirsutum
tgtcgtatatggtaaatgcagctaaagt

SEQ ID NO: 25762 - DNA, 14 bp, Gossypium hirsutum
cagagcaaaatgag

SEQ ID NO: 25763 - DNA, 17 bp, Gossypium hirsutum
ctacagagcaagatgag

SEQ ID NO: 25764 - DNA, 38 bp, Gossypium hirsutum
gggttcatatatttttaaatttatctgccttagtttcc

SEQ ID NO: 25765 - DNA, 31 bp, Gossypium hirsutum
gggcaaaacacaaaaattaatagcataaact

SEQ ID NO: 25766 - DNA, 18 bp, Gossypium hirsutum
ccgttcagacatgatata

SEQ ID NO: 25767 - DNA, 17 bp, Gossypium hirsutum
cgttcagacaggatata

SEQ ID NO: 25768 - DNA, 35 bp, Gossypium hirsutum
aggcttgtaaaactatattctaataggagtgtagt

SEQ ID NO: 25769 - DNA, 29 bp, Gossypium hirsutum
cctcaccttgtaaccccttaatctaattt

SEQ ID NO: 25770 - DNA, 19 bp, Gossypium hirsutum
cattttttcattgatttgc

SEQ ID NO: 25771 - DNA, 18 bp, Gossypium hirsutum
attttttcatcgatttgc

SEQ ID NO: 25772 - DNA, 26 bp, Gossypium hirsutum
caaatggagaaagctaattggctgaa

SEQ ID NO: 25773 - DNA, 23 bp, Gossypium hirsutum
cctcaaatcaccactcgtaacca

SEQ ID NO: 25774 - DNA, 17 bp, Gossypium hirsutum
ccatcccttccccacgc

SEQ ID NO: 25775 - DNA, 17 bp, Gossypium hirsutum
ccatccctttcccacgc

SEQ ID NO: 25776 - DNA, 21 bp, Gossypium hirsutum
tggccatgtagacgttttcgt

SEQ ID NO: 25777 - DNA, 30 bp, Gossypium hirsutum
tcctgttacttttattttgcacattttcgt

SEQ ID NO: 25778 - DNA, 14 bp, Gossypium hirsutum
atcccagcaattgg

SEQ ID NO: 25779 - DNA, 15 bp, Gossypium hirsutum
catcccagtaattgg

SEQ ID NO: 25780 - DNA, 25 bp, Gossypium hirsutum
caaagtggcagtccaagtgaatttt

SEQ ID NO: 25781 - DNA, 19 bp, Gossypium hirsutum
ggagggatccggtgaagtc

SEQ ID NO: 25782 - DNA, 14 bp, Gossypium hirsutum
catgcgaaggttgc

SEQ ID NO: 25783 - DNA, 14 bp, Gossypium hirsutum
catgcgaatgttgc

SEQ ID NO: 25784 - DNA, 16 bp, Gossypium hirsutum
catgccacgcgtccac

SEQ ID NO: 25785 - DNA, 25 bp, Gossypium hirsutum
cctccttctctttgtgtgtctttct

SEQ ID NO: 25786 - DNA, 15 bp, Gossypium hirsutum
ccgtgtgacacgatc

SEQ ID NO: 25787 - DNA, 14 bp, Gossypium hirsutum
cgtgtgacacgctc

SEQ ID NO: 25788 - DNA, 22 bp, Gossypium hirsutum
tcgagcacagcctgaagtaatc

SEQ ID NO: 25789 - DNA, 23 bp, Gossypium hirsutum
cgttcaataggacatgcaaagca

SEQ ID NO: 25790 - DNA, 16 bp, Gossypium hirsutum
aaccagtaagaaaaag

SEQ ID NO: 25791 - DNA, 16 bp, Gossypium hirsutum
aaccagtatgaaaaag

SEQ ID NO: 25792 - DNA, 25 bp, Gossypium hirsutum
cctttccccctttctctgttctttc

SEQ ID NO: 25793 - DNA, 27 bp, Gossypium hirsutum
gacccagccattgtaatattttgttgt

SEQ ID NO: 25794 - DNA, 20 bp, Gossypium hirsutum
atgcaggtatgataacagta

SEQ ID NO: 25795 - DNA, 19 bp, Gossypium hirsutum
tgcaggtatgatcacagta

SEQ ID NO: 25796 - DNA, 28 bp, Gossypium hirsutum
tgaaataactacaaaaacagcatgtgca

SEQ ID NO: 25797 - DNA, 23 bp, Gossypium hirsutum
ccgatttcttcccttggaaaagg

SEQ ID NO: 25798 - DNA, 19 bp, Gossypium hirsutum
cacttaattgctgctccaa

SEQ ID NO: 25799 - DNA, 20 bp, Gossypium hirsutum
acacttaattgctactccaa

SEQ ID NO: 25800 - DNA, 22 bp, Gossypium hirsutum
tcaccaatcaaggcttcgatga

SEQ ID NO: 25801 - DNA, 18 bp, Gossypium hirsutum
gacggccgcgatttcatc

SEQ ID NO: 25802 - DNA, 15 bp, Gossypium hirsutum
tcggatccgacaatg

SEQ ID NO: 25803 - DNA, 14 bp, Gossypium hirsutum
cggatcagacaatg

SEQ ID NO: 25804 - DNA, 21 bp, Gossypium hirsutum
cgtacccccaacgacatatcg

SEQ ID NO: 25805 - DNA, 30 bp, Gossypium hirsutum
tgtttgggacctaattgtaaaagagtttga

SEQ ID NO: 25806 - DNA, 24 bp, Gossypium hirsutum
ttttatatagaaattctaaatttc

SEQ ID NO: 25807 - DNA, 17 bp, Gossypium hirsutum
tagaaattctgaatttc

SEQ ID NO: 25808 - DNA, 44 bp, Gossypium hirsutum
tcaactaagataattttctcaatttatacttttcctacacatta

SEQ ID NO: 25809 - DNA, 26 bp, Gossypium hirsutum
tctcaattggtccatcggttaaacat

SEQ ID NO: 25810 - DNA, 20 bp, Gossypium hirsutum
aaatttgttggaggttatgt

SEQ ID NO: 25811 - DNA, 19 bp, Gossypium hirsutum
aatttgttggagattatgt

SEQ ID NO: 25812 - DNA, 23 bp, Gossypium hirsutum
cggttagccacttgttttctcaa

SEQ ID NO: 25813 - DNA, 29 bp, Gossypium hirsutum
tgggaaatgaaggttatatcttgttggtt

SEQ ID NO: 25814 - DNA, 17 bp, Gossypium hirsutum
ctgattggaacacttaa

SEQ ID NO: 25815 - DNA, 16 bp, Gossypium hirsutum
tgattggagcacttaa

SEQ ID NO: 25816 - DNA, 23 bp, Gossypium hirsutum
aaaagctagagagcggactgttc

SEQ ID NO: 25817 - DNA, 22 bp, Gossypium hirsutum
gggcgctttcatgaatcttctg

SEQ ID NO: 25818 - DNA, 17 bp, Gossypium hirsutum
ccaaaacaagcggtcca

SEQ ID NO: 25819 - DNA, 18 bp, Gossypium hirsutum
cccaaaacaaacggtcca

SEQ ID NO: 25820 - DNA, 25 bp, Gossypium hirsutum
ttgttggacgtaaagcaaagaaagg

SEQ ID NO: 25821 - DNA, 25 bp, Gossypium hirsutum
gactcacgtgaaaatgttggatacg

SEQ ID NO: 25822 - DNA, 20 bp, Gossypium hirsutum
caaatacaaggaagaacata

SEQ ID NO: 25823 - DNA, 20 bp, Gossypium hirsutum
caaatacaaggaaaaacata

SEQ ID NO: 25824 - DNA, 33 bp, Gossypium hirsutum
aaatctgacacatattgatacttggttaaagga

SEQ ID NO: 25825 - DNA, 29 bp, Gossypium hirsutum
aaaggaaacaaacacaacacacatgtaat

SEQ ID NO: 25826 - DNA, 15 bp, Gossypium hirsutum
ttgtcaccaaagctt

SEQ ID NO: 25827 - DNA, 16 bp, Gossypium hirsutum
tttgtcacaaaagctt

SEQ ID NO: 25828 - DNA, 32 bp, Gossypium hirsutum
gtttgatgcttaaataccaacttttagtgtca

SEQ ID NO: 25829 - DNA, 23 bp, Gossypium hirsutum
aagcagtctaaaggcagccttag

SEQ ID NO: 25830 - DNA, 20 bp, Gossypium hirsutum
tcaacgataaaaaaatatgt

SEQ ID NO: 25831 - DNA, 19 bp, Gossypium hirsutum
tcaacgataaaaaatatgt

SEQ ID NO: 25832 - DNA, 24 bp, Gossypium hirsutum
gtgttaatgtgacttggcaacctt

SEQ ID NO: 25833 - DNA, 36 bp, Gossypium hirsutum
gactctaatcttgtaaatttatgttgtcctatgtct

SEQ ID NO: 25834 - DNA, 15 bp, Gossypium hirsutum
agttgcatgcaatcc

SEQ ID NO: 25835 - DNA, 15 bp, Gossypium hirsutum
agttgcatacaatcc

SEQ ID NO: 25836 - DNA, 28 bp, Gossypium hirsutum
gaggaggaatagaccctgtttaagagta

SEQ ID NO: 25837 - DNA, 26 bp, Gossypium hirsutum
cttaacggtttccaatcaacaattgc

SEQ ID NO: 25838 - DNA, 21 bp, Gossypium hirsutum
ttacttggatcaacacgaata

SEQ ID NO: 25839 - DNA, 21 bp, Gossypium hirsutum
ttacttggatcaacccgaata

SEQ ID NO: 25840 - DNA, 24 bp, Gossypium hirsutum
tggctccgagaagtcatattttgg

SEQ ID NO: 25841 - DNA, 29 bp, Gossypium hirsutum
agtcagattgtattttgctccctttactt

SEQ ID NO: 25842 - DNA, 17 bp, Gossypium hirsutum
ccttgtacaaggatcag

SEQ ID NO: 25843 - DNA, 18 bp, Gossypium hirsutum
tccttgtacaatgatcag

SEQ ID NO: 25844 - DNA, 37 bp, Gossypium hirsutum
ccccctctacttaaaaaataggtaaattaatctctac

SEQ ID NO: 25845 - DNA, 40 bp, Gossypium hirsutum
ccaatataattttacaattaaagtttaaggcttggactta

SEQ ID NO: 25846 - DNA, 20 bp, Gossypium hirsutum
cttatggtgttccccatgga

SEQ ID NO: 25847 - DNA, 20 bp, Gossypium hirsutum
cttatggtgtttcccatgga

SEQ ID NO: 25848 - DNA, 25 bp, Gossypium hirsutum
ctgaatactccttgtcccaccataa

SEQ ID NO: 25849 - DNA, 23 bp, Gossypium hirsutum
catccacacccaccctaaatctt

SEQ ID NO: 25850 - DNA, 18 bp, Gossypium hirsutum
aaatcatgccctgataaa

SEQ ID NO: 25851 - DNA, 15 bp, Gossypium hirsutum
tcatgccccgataaa

SEQ ID NO: 25852 - DNA, 27 bp, Gossypium hirsutum
ccgtctcaataggaaaaatgtgaggat

SEQ ID NO: 25853 - DNA, 31 bp, Gossypium hirsutum
gcatgcttcatactgttttactgattaagac

SEQ ID NO: 25854 - DNA, 20 bp, Gossypium hirsutum
ttgaatcaataggagaagtg

SEQ ID NO: 25855 - DNA, 21 bp, Gossypium hirsutum
tttgaatcaataagagaagtg

SEQ ID NO: 25856 - DNA, 30 bp, Gossypium hirsutum
agggatcaaagttcatgatctaacaattca

SEQ ID NO: 25857 - DNA, 35 bp, Gossypium hirsutum
cccttgcattctgtaatttgttcagaataatttaa

SEQ ID NO: 25858 - DNA, 20 bp, Gossypium hirsutum
ccgtacattatcgtcagaac

SEQ ID NO: 25859 - DNA, 19 bp, Gossypium hirsutum
cgtacattatcatcagaac

SEQ ID NO: 25860 - DNA, 28 bp, Gossypium hirsutum
actccttgaacaacttcaggaatatcaa

SEQ ID NO: 25861 - DNA, 36 bp, Gossypium hirsutum
tgcagtataaaaaaaccataacaagaaagtgtaaat

SEQ ID NO: 25862 - DNA, 17 bp, Gossypium hirsutum
cattttccaagaatctt

SEQ ID NO: 25863 - DNA, 18 bp, Gossypium hirsutum
tcattttccaataatctt

SEQ ID NO: 25864 - DNA, 38 bp, Gossypium hirsutum
gggactaaggtatcatagcttttatgtataaattaagc

SEQ ID NO: 25865 - DNA, 22 bp, Gossypium hirsutum
gctgctgcatcacacactaaaa

SEQ ID NO: 25866 - DNA, 18 bp, Gossypium hirsutum
agctcaaattgttttgca

SEQ ID NO: 25867 - DNA, 19 bp, Gossypium hirsutum
tagctcaaattattttgca

SEQ ID NO: 25868 - DNA, 25 bp, Gossypium hirsutum
acagcagaacacaattcaatttgca

SEQ ID NO: 25869 - DNA, 16 bp, Gossypium hirsutum
ggagcgtgctggctgt

SEQ ID NO: 25870 - DNA, 18 bp, Gossypium hirsutum
aaaaccttaggcgccgca

SEQ ID NO: 25871 - DNA, 18 bp, Gossypium hirsutum
aaaaccttaggagccgca

SEQ ID NO: 25872 - DNA, 23 bp, Gossypium hirsutum
cccaaaatcagaagcaggaaacc

SEQ ID NO: 25873 - DNA, 25 bp, Gossypium hirsutum
cctgactaggcaacggaaaatgata

SEQ ID NO: 25874 - DNA, 15 bp, Gossypium hirsutum
actggctagccttct

SEQ ID NO: 25875 - DNA, 15 bp, Gossypium hirsutum
actggctaaccttct

SEQ ID NO: 25876 - DNA, 25 bp, Gossypium hirsutum
tcttagcttcaacagcatcaacaca

SEQ ID NO: 25877 - DNA, 29 bp, Gossypium hirsutum
tccggtctgatctgacctaaatattatgt

SEQ ID NO: 25878 - DNA, 17 bp, Gossypium hirsutum
tttagttgggtaaattt

SEQ ID NO: 25879 - DNA, 20 bp, Gossypium hirsutum
ttatttagttggataaattt

SEQ ID NO: 25880 - DNA, 24 bp, Gossypium hirsutum
cgggctcgcccatatttaaatttt

SEQ ID NO: 25881 - DNA, 45 bp, Gossypium hirsutum
cataataattcaaacgtgaaatacaatagttatcatagttttaga

SEQ ID NO: 25882 - DNA, 22 bp, Gossypium hirsutum
caacaatcacatttaatataat

SEQ ID NO: 25883 - DNA, 21 bp, Gossypium hirsutum
aacaatcacatttagtataat

SEQ ID NO: 25884 - DNA, 35 bp, Gossypium hirsutum
agaacggcgattaaattgtcattaatttttattga

SEQ ID NO: 25885 - DNA, 30 bp, Gossypium hirsutum
agcttccttatgtcgattacttaacacaat

SEQ ID NO: 25886 - DNA, 16 bp, Gossypium hirsutum
aaaccttggatgcttg

SEQ ID NO: 25887 - DNA, 16 bp, Gossypium hirsutum
aaaccttgaatgcttg

SEQ ID NO: 25888 - DNA, 25 bp, Gossypium hirsutum
cctgggctttagcaaaaattatggt

SEQ ID NO: 25889 - DNA, 29 bp, Gossypium hirsutum
tccaagtagacaaactttattccgtacac

SEQ ID NO: 25890 - DNA, 20 bp, Gossypium hirsutum
caatgtagtaagggaacata

SEQ ID NO: 25891 - DNA, 19 bp, Gossypium hirsutum
aatgtagtaaggcaacata

SEQ ID NO: 25892 - DNA, 22 bp, Gossypium hirsutum
tgatgttgatgacggtgcttca

SEQ ID NO: 25893 - DNA, 34 bp, Gossypium hirsutum
gcttatatacttattgtttctcgtttctttctgg

SEQ ID NO: 25894 - DNA, 17 bp, Gossypium hirsutum
acaaaccacctaatacc

SEQ ID NO: 25895 - DNA, 15 bp, Gossypium hirsutum
aaaccacccaatacc

SEQ ID NO: 25896 - DNA, 23 bp, Gossypium hirsutum
gacaacatgacaacgtacgacaa

SEQ ID NO: 25897 - DNA, 25 bp, Gossypium hirsutum
gccttgtgcctttttgttctttcat

SEQ ID NO: 25898 - DNA, 20 bp, Gossypium hirsutum
atttgagcaactattggatt

SEQ ID NO: 25899 - DNA, 18 bp, Gossypium hirsutum
ttgagcaactgttggatt

SEQ ID NO: 25900 - DNA, 18 bp, Gossypium hirsutum
gagccagcacctcttcga

SEQ ID NO: 25901 - DNA, 23 bp, Gossypium hirsutum
gcatcaaggaaacagggatttgg

SEQ ID NO: 25902 - DNA, 21 bp, Gossypium hirsutum
tctaacccgaattaatataat

SEQ ID NO: 25903 - DNA, 16 bp, Gossypium hirsutum
cccgaattgatataat

SEQ ID NO: 25904 - DNA, 25 bp, Gossypium hirsutum
actgacctccgatcgaattagatga

SEQ ID NO: 25905 - DNA, 25 bp, Gossypium hirsutum
cttatggcaccttccctgtatcaaa

SEQ ID NO: 25906 - DNA, 19 bp, Gossypium hirsutum
caaagcaaatgtataccat

SEQ ID NO: 25907 - DNA, 19 bp, Gossypium hirsutum
caaagcaaatgtttaccat

SEQ ID NO: 25908 - DNA, 28 bp, Gossypium hirsutum
tgagagaattgtttgcctcttatccatt

SEQ ID NO: 25909 - DNA, 24 bp, Gossypium hirsutum
gcgttggattagcagacatagaca

SEQ ID NO: 25910 - DNA, 20 bp, Gossypium hirsutum
ctatatgaacccctatctct

SEQ ID NO: 25911 - DNA, 20 bp, Gossypium hirsutum
ctatatgaacccttatctct

SEQ ID NO: 25912 - DNA, 20 bp, Gossypium hirsutum
tgggttcgaccgctactaga

SEQ ID NO: 25913 - DNA, 35 bp, Gossypium hirsutum
cccctttaaatccaaatatttctttgtcaaatttc

SEQ ID NO: 25914 - DNA, 20 bp, Gossypium hirsutum
aaacggatattaatttttca

SEQ ID NO: 25915 - DNA, 19 bp, Gossypium hirsutum
aacggatattaatctttca

SEQ ID NO: 25916 - DNA, 38 bp, Gossypium hirsutum
ttgtcaaatcatgatgtttgtaatatgtagtatgtttg

SEQ ID NO: 25917 - DNA, 35 bp, Gossypium hirsutum
gatggttaattatggttttagcccttatactatgt

SEQ ID NO: 25918 - DNA, 22 bp, Gossypium hirsutum
ttaaagtaaagagatgaaatat

SEQ ID NO: 25919 - DNA, 23 bp, Gossypium hirsutum
attaaagtaaagagataaaatat

SEQ ID NO: 25920 - DNA, 45 bp, Gossypium hirsutum
acgatttgcacttactaataacattattaaaagtagaaaaataaa

SEQ ID NO: 25921 - DNA, 30 bp, Gossypium hirsutum
gaaaatcgttgagttcatcagaacttacaa

SEQ ID NO: 25922 - DNA, 17 bp, Gossypium hirsutum
cggttgacctatagatt

SEQ ID NO: 25923 - DNA, 17 bp, Gossypium hirsutum
cggttgacctatggatt

SEQ ID NO: 25924 - DNA, 20 bp, Gossypium hirsutum
ttccttgcaccacgaacctt

SEQ ID NO: 25925 - DNA, 22 bp, Gossypium hirsutum
ggtatcccccaactcctagtga

SEQ ID NO: 25926 - DNA, 20 bp, Gossypium hirsutum
ccagtggaataataataaaa

SEQ ID NO: 25927 - DNA, 18 bp, Gossypium hirsutum
agtggaataataaaaaaa

SEQ ID NO: 25928 - DNA, 21 bp, Gossypium hirsutum
tccgtcacgtcgcaaagataa

SEQ ID NO: 25929 - DNA, 30 bp, Gossypium hirsutum
caataaaatcatggcacatgtctcataaga

SEQ ID NO: 25930 - DNA, 26 bp, Gossypium hirsutum
aaaaattaaccaataacttattaatt

SEQ ID NO: 25931 - DNA, 22 bp, Gossypium hirsutum
attaaccaataactaattaatt

SEQ ID NO: 25932 - DNA, 34 bp, Gossypium hirsutum
atttcagatacgagagagaatagttgtgaaaaat

SEQ ID NO: 25933 - DNA, 28 bp, Gossypium hirsutum
ttgagaggaattatgggtagttctaggt

SEQ ID NO: 25934 - DNA, 18 bp, Gossypium hirsutum
caagttgtcctacaagaa

SEQ ID NO: 25935 - DNA, 18 bp, Gossypium hirsutum
caagttgtcctgcaagaa

SEQ ID NO: 25936 - DNA, 31 bp, Gossypium hirsutum
gttgaaatgtcagataaatgtgatgtgtctt

SEQ ID NO: 25937 - DNA, 32 bp, Gossypium hirsutum
tttaatcactcacttgttagttatcgtcactt

SEQ ID NO: 25938 - DNA, 20 bp, Gossypium hirsutum
cataataatcactcaattat

SEQ ID NO: 25939 - DNA, 19 bp, Gossypium hirsutum
ataataatcacccaattat

SEQ ID NO: 25940 - DNA, 28 bp, Gossypium hirsutum
aattcaacactcccattatgttaagggt

SEQ ID NO: 25941 - DNA, 27 bp, Gossypium hirsutum
ggagcaaagtgtatttttaccgtacct

SEQ ID NO: 25942 - DNA, 24 bp, Gossypium hirsutum
ttataaaagtgttaaaaaaaactt

SEQ ID NO: 25943 - DNA, 19 bp, Gossypium hirsutum
aaagtgttaaaagaaactt

SEQ ID NO: 25944 - DNA, 24 bp, Gossypium hirsutum
gttgggtttcgaccctctatactg

SEQ ID NO: 25945 - DNA, 25 bp, Gossypium hirsutum
gggttgtcaatcccagtactctttt

SEQ ID NO: 25946 - DNA, 17 bp, Gossypium hirsutum
ctcattgcactaaggat

SEQ ID NO: 25947 - DNA, 16 bp, Gossypium hirsutum
tcattgcagtaaggat

SEQ ID NO: 25948 - DNA, 29 bp, Gossypium hirsutum
gcaataagagcatgcatatatcaacagaa

SEQ ID NO: 25949 - DNA, 23 bp, Gossypium hirsutum
gcaaagcaactcgaccctaattt

SEQ ID NO: 25950 - DNA, 19 bp, Gossypium hirsutum
ctaaatacatcggattaac

SEQ ID NO: 25951 - DNA, 19 bp, Gossypium hirsutum
ctaaatacatcagattaac

SEQ ID NO: 25952 - DNA, 28 bp, Gossypium hirsutum
gcatcccgtaaatagtgaaacatatggt

SEQ ID NO: 25953 - DNA, 26 bp, Gossypium hirsutum
ggattttcagacaactcgaattgtgt

SEQ ID NO: 25954 - DNA, 20 bp, Gossypium hirsutum
tcagtttaactcgaatatga

SEQ ID NO: 25955 - DNA, 20 bp, Gossypium hirsutum
tcagtttaactcaaatatga

SEQ ID NO: 25956 - DNA, 33 bp, Gossypium hirsutum
tgagttaatcaagttattcagatcaactcgaat

SEQ ID NO: 25957 - DNA, 41 bp, Gossypium hirsutum
agcatatacaaaattaacccataactaacaattaaattgag

SEQ ID NO: 25958 - DNA, 18 bp, Gossypium hirsutum
catccattttcatcattg

SEQ ID NO: 25959 - DNA, 18 bp, Gossypium hirsutum
catccattttcgtcattg

SEQ ID NO: 25960 - DNA, 41 bp, Gossypium hirsutum
ggtccctatcttgtatgaataatatgtttattgaatcttta

SEQ ID NO: 25961 - DNA, 27 bp, Gossypium hirsutum
agtagaaccataccttagccactagtt

SEQ ID NO: 25962 - DNA, 19 bp, Gossypium hirsutum
attcttgctaaagggatta

SEQ ID NO: 25963 - DNA, 19 bp, Gossypium hirsutum
attcttgctaaaaggatta

SEQ ID NO: 25964 - DNA, 26 bp, Gossypium hirsutum
caagtgcttaatgttgtgacaaacct

SEQ ID NO: 25965 - DNA, 29 bp, Gossypium hirsutum
acctcaaatggatagaatgtcaactttgt

SEQ ID NO: 25966 - DNA, 17 bp, Gossypium hirsutum
catacacgtggatgtta

SEQ ID NO: 25967 - DNA, 17 bp, Gossypium hirsutum
catacacgtgaatgtta

SEQ ID NO: 25968 - DNA, 34 bp, Gossypium hirsutum
gaaaaagttaatgtcttttagctttgatgacatg

SEQ ID NO: 25969 - DNA, 26 bp, Gossypium hirsutum
aggttgctaaatatccacacgtactc

SEQ ID NO: 25970 - DNA, 20 bp, Gossypium hirsutum
tcatataaccttagaaagct

SEQ ID NO: 25971 - DNA, 18 bp, Gossypium hirsutum
catataaccttgaaagct

SEQ ID NO: 25972 - DNA, 26 bp, Gossypium hirsutum
tcctagactatgatgcgaaaggatca

SEQ ID NO: 25973 - DNA, 26 bp, Gossypium hirsutum
tgatgacgctattcgtctttgattgt

SEQ ID NO: 25974 - DNA, 21 bp, Gossypium hirsutum
acattatcgattagtgaaaag

SEQ ID NO: 25975 - DNA, 20 bp, Gossypium hirsutum
cattatcgattaatgaaaag

SEQ ID NO: 25976 - DNA, 24 bp, Gossypium hirsutum
tgatcctagtgcttgcgaatcttg

SEQ ID NO: 25977 - DNA, 25 bp, Gossypium hirsutum
cagacgacaaccgttgcaataaatt

SEQ ID NO: 25978 - DNA, 20 bp, Gossypium hirsutum
actctgcagttatcttatac

SEQ ID NO: 25979 - DNA, 19 bp, Gossypium hirsutum
ctctgcagttattttatac

SEQ ID NO: 25980 - DNA, 19 bp, Gossypium hirsutum
aacctaccacccaccctca

SEQ ID NO: 25981 - DNA, 31 bp, Gossypium hirsutum
ctcttctatcggatcaagaaatttcatcact

SEQ ID NO: 25982 - DNA, 14 bp, Gossypium hirsutum
aaaggcgaactcac

SEQ ID NO: 25983 - DNA, 14 bp, Gossypium hirsutum
aaaggcaaactcac

SEQ ID NO: 25984 - DNA, 24 bp, Gossypium hirsutum
cacgggaagaacgttaattgatgt

SEQ ID NO: 25985 - DNA, 38 bp, Gossypium hirsutum
aaaagtttctaaataatatagtagcctgaaacaagact

SEQ ID NO: 25986 - DNA, 22 bp, Gossypium hirsutum
ctttaaattcggtgttttctaa

SEQ ID NO: 25987 - DNA, 17 bp, Gossypium hirsutum
aattcggtgtgttctaa

SEQ ID NO: 25988 - DNA, 31 bp, Gossypium hirsutum
gacaatgaaatccaaagagaaagtccaaatt

SEQ ID NO: 25989 - DNA, 25 bp, Gossypium hirsutum
gcaaagcactgagctgaagtaatac

SEQ ID NO: 25990 - DNA, 22 bp, Gossypium hirsutum
cattatgtactgaaccccggag

SEQ ID NO: 25991 - DNA, 20 bp, Gossypium hirsutum
ttatgtactgaacgccggag

SEQ ID NO: 25992 - DNA, 27 bp, Gossypium hirsutum
agtgatctacaaagcaatgaggttctg

SEQ ID NO: 25993 - DNA, 42 bp, Gossypium hirsutum
gcacattataccaatttagttatggttctaaaaattaagaaa

SEQ ID NO: 25994 - DNA, 25 bp, Gossypium hirsutum
aaattcaaaaatacatataaattaa

SEQ ID NO: 25995 - DNA, 25 bp, Gossypium hirsutum
aaattcaaaaatacatatacattaa

SEQ ID NO: 25996 - DNA, 23 bp, Gossypium hirsutum
gaacctttcctggtgctcttagg

SEQ ID NO: 25997 - DNA, 43 bp, Gossypium hirsutum
tgttatttttagatttataggaagtgaagtaatggttaattca

SEQ ID NO: 25998 - DNA, 23 bp, Gossypium hirsutum
aaatataattaacctaaaataac

SEQ ID NO: 25999 - DNA, 16 bp, Gossypium hirsutum
attaaccgaaaataac

SEQ ID NO: 26000 - DNA, 29 bp, Gossypium hirsutum
ctcactccatcataagaacttgaagagaa

SEQ ID NO: 26001 - DNA, 29 bp, Gossypium hirsutum
attgagttgataaggttgattttggttcg

SEQ ID NO: 26002 - DNA, 18 bp, Gossypium hirsutum
actgaatttcagattcat

SEQ ID NO: 26003 - DNA, 17 bp, Gossypium hirsutum
ctgaatttcggattcat

SEQ ID NO: 26004 - DNA, 27 bp, Gossypium hirsutum
tggcatgaaccctaagtaatctacact

SEQ ID NO: 26005 - DNA, 25 bp, Gossypium hirsutum
cacgagtgtttcagaccatcataca

SEQ ID NO: 26006 - DNA, 15 bp, Gossypium hirsutum
cctgcgtaggtgttg

SEQ ID NO: 26007 - DNA, 16 bp, Gossypium hirsutum
acctgcgtatgtgttg

SEQ ID NO: 26008 - DNA, 25 bp, Gossypium hirsutum
gcagtgtggaaacctgtaattctgt

SEQ ID NO: 26009 - DNA, 24 bp, Gossypium hirsutum
tgtccagccattcatcctgttatg

SEQ ID NO: 26010 - DNA, 19 bp, Gossypium hirsutum
ccagtgaataagcgactta

SEQ ID NO: 26011 - DNA, 18 bp, Gossypium hirsutum
cagtgaataagcaactta

SEQ ID NO: 26012 - DNA, 21 bp, Gossypium hirsutum
ttcctccacagcaacatccaa

SEQ ID NO: 26013 - DNA, 31 bp, Gossypium hirsutum
acttttaagacaatatctcacaaccctttca

SEQ ID NO: 26014 - DNA, 20 bp, Gossypium hirsutum
cgaatatgaagtctggaaat

SEQ ID NO: 26015 - DNA, 20 bp, Gossypium hirsutum
cgaatatgaagtctagaaat

SEQ ID NO: 26016 - DNA, 22 bp, Gossypium hirsutum
ctcgacattggagtccatggat

SEQ ID NO: 26017 - DNA, 25 bp, Gossypium hirsutum
acactgtatggtgcacttaattgga

SEQ ID NO: 26018 - DNA, 17 bp, Gossypium hirsutum
tctgtgctcttaaacaa

SEQ ID NO: 26019 - DNA, 16 bp, Gossypium hirsutum
ctgtgctcttaaagaa

SEQ ID NO: 26020 - DNA, 33 bp, Gossypium hirsutum
ttctcttacagtgaaatacatttaggttcagtt

SEQ ID NO: 26021 - DNA, 25 bp, Gossypium hirsutum
gaggctggagcaaagtaaagatgat

SEQ ID NO: 26022 - DNA, 19 bp, Gossypium hirsutum
atcataactgagcttcaac

SEQ ID NO: 26023 - DNA, 19 bp, Gossypium hirsutum
atcataactgaacttcaac

SEQ ID NO: 26024 - DNA, 30 bp, Gossypium hirsutum
agtaaaacattgttgcaaatgagatgacaa

SEQ ID NO: 26025 - DNA, 25 bp, Gossypium hirsutum
ccacttttgctccttttgatgtgat

SEQ ID NO: 26026 - DNA, 18 bp, Gossypium hirsutum
ctgatcgcatcatgtaat

SEQ ID NO: 26027 - DNA, 18 bp, Gossypium hirsutum
ctgatcgcatcctgtaat

SEQ ID NO: 26028 - DNA, 22 bp, Gossypium hirsutum
ccctcgtgtttaggccaatctc

SEQ ID NO: 26029 - DNA, 25 bp, Gossypium hirsutum
gctaagatggtggagaaatgggttt

SEQ ID NO: 26030 - DNA, 17 bp, Gossypium hirsutum
cgactatgtggtgaagc

SEQ ID NO: 26031 - DNA, 18 bp, Gossypium hirsutum
tcgactatgtagtgaagc

SEQ ID NO: 26032 - DNA, 25 bp, Gossypium hirsutum
ggttcaacagatgaggtccaaattg

SEQ ID NO: 26033 - DNA, 25 bp, Gossypium hirsutum
ggccttttctttcctatcccatgtt

SEQ ID NO: 26034 - DNA, 24 bp, Gossypium hirsutum
atgaataaggacaaaatatcttat

SEQ ID NO: 26035 - DNA, 21 bp, Gossypium hirsutum
aataaggacaaaatgtcttat

SEQ ID NO: 26036 - DNA, 50 bp, Gossypium hirsutum
gaaagaacaaaataaaatataaatcttaatataagtaactccataacaca

SEQ ID NO: 26037 - DNA, 38 bp, Gossypium hirsutum
cacataccactaatattattccatatttgaatcgtttt

SEQ ID NO: 26038 - DNA, 25 bp, Gossypium hirsutum
ctatagttgaatacattaattttaa

SEQ ID NO: 26039 - DNA, 23 bp, Gossypium hirsutum
atagttgaatacattaatttaaa

SEQ ID NO: 26040 - DNA, 26 bp, Gossypium hirsutum
agagattgtaggttgaaagtgcgttt

SEQ ID NO: 26041 - DNA, 25 bp, Gossypium hirsutum
cgttggcatcaatttttcatttgca

SEQ ID NO: 26042 - DNA, 20 bp, Gossypium hirsutum
tcatatagatgtcgatgtcc

SEQ ID NO: 26043 - DNA, 18 bp, Gossypium hirsutum
atatagatgtcaatgtcc

SEQ ID NO: 26044 - DNA, 19 bp, Gossypium hirsutum
gctcgtacaacgccaacgt

SEQ ID NO: 26045 - DNA, 28 bp, Gossypium hirsutum
cattacaagcaagcatatcaaccaagat

SEQ ID NO: 26046 - DNA, 19 bp, Gossypium hirsutum
cctcttactcaatataaat

SEQ ID NO: 26047 - DNA, 18 bp, Gossypium hirsutum
ctcttactcaacataaat

SEQ ID NO: 26048 - DNA, 35 bp, Gossypium hirsutum
acaagtactcactcttttctataattggtatcaga

SEQ ID NO: 26049 - DNA, 32 bp, Gossypium hirsutum
atgagattgaagagaggattaagatagtggat

SEQ ID NO: 26050 - DNA, 18 bp, Gossypium hirsutum
ctctattgtcgttttcac

SEQ ID NO: 26051 - DNA, 17 bp, Gossypium hirsutum
tctattgtcgctttcac

SEQ ID NO: 26052 - DNA, 27 bp, Gossypium hirsutum
tcaaacttttcatctcctccaattcca

SEQ ID NO: 26053 - DNA, 23 bp, Gossypium hirsutum
ggtatgggaccctccaaatgatt

SEQ ID NO: 26054 - DNA, 19 bp, Gossypium hirsutum
ccattaaattggataaatg

SEQ ID NO: 26055 - DNA, 18 bp, Gossypium hirsutum
cattaaattgggtaaatg

SEQ ID NO: 26056 - DNA, 24 bp, Gossypium hirsutum
ggctcaatcccttcatcactactt

SEQ ID NO: 26057 - DNA, 26 bp, Gossypium hirsutum
gctcaactaatgacaagaatgagctt

SEQ ID NO: 26058 - DNA, 18 bp, Gossypium hirsutum
ccttactattgaaccaac

SEQ ID NO: 26059 - DNA, 18 bp, Gossypium hirsutum
ccttactattaaaccaac

SEQ ID NO: 26060 - DNA, 25 bp, Gossypium hirsutum
acaagaactcaaacaccagatcact

SEQ ID NO: 26061 - DNA, 37 bp, Gossypium hirsutum
aatcgttatcaattgtacagaaagaattataggtcat

SEQ ID NO: 26062 - DNA, 17 bp, Gossypium hirsutum
ctcactaaggaatctag

SEQ ID NO: 26063 - DNA, 17 bp, Gossypium hirsutum
ctcactaagaaatctag

SEQ ID NO: 26064 - DNA, 33 bp, Gossypium hirsutum
tgacctcttggcactaaaaatcaattatcttat

SEQ ID NO: 26065 - DNA, 25 bp, Gossypium hirsutum
acctgccaattgtaggaaaatcaca

SEQ ID NO: 26066 - DNA, 21 bp, Gossypium hirsutum
ttctgaaatcacatattaact

SEQ ID NO: 26067 - DNA, 18 bp, Gossypium hirsutum
tgaaatcacaaattaact

SEQ ID NO: 26068 - DNA, 26 bp, Gossypium hirsutum
gccatcagtgttgtatttgttgcata

SEQ ID NO: 26069 - DNA, 25 bp, Gossypium hirsutum
gacccctgcatagttaagaaactca

SEQ ID NO: 26070 - DNA, 14 bp, Gossypium hirsutum
ccgccggtcccgtt

SEQ ID NO: 26071 - DNA, 14 bp, Gossypium hirsutum
ccgccgatcccgtt

SEQ ID NO: 26072 - DNA, 25 bp, Gossypium hirsutum
gcaatgaacggagggatgaatacat

SEQ ID NO: 26073 - DNA, 25 bp, Gossypium hirsutum
cgtgcctttttccacttcttctttt

SEQ ID NO: 26074 - DNA, 18 bp, Gossypium hirsutum
ctcgtgactttgtaagca

SEQ ID NO: 26075 - DNA, 18 bp, Gossypium hirsutum
ctcgtgactttttaagca

SEQ ID NO: 26076 - DNA, 25 bp, Gossypium hirsutum
ccaaatttgtgacttacccctaagc

SEQ ID NO: 26077 - DNA, 46 bp, Gossypium hirsutum
acctaatttggtttatatgaataaaatgtaagattttattgttctg

SEQ ID NO: 26078 - DNA, 26 bp, Gossypium hirsutum
ttgatatgataatttatatgaattaa

SEQ ID NO: 26079 - DNA, 21 bp, Gossypium hirsutum
atgataatttatgtgaattaa

SEQ ID NO: 26080 - DNA, 35 bp, Gossypium hirsutum
gcatatgtaagtctattttgactaaaattgttgca

SEQ ID NO: 26081 - DNA, 33 bp, Gossypium hirsutum
gcatggatttacatcgatttagatagagttagt

SEQ ID NO: 26082 - DNA, 21 bp, Gossypium hirsutum
tcaaccatttttttatccaac

SEQ ID NO: 26083 - DNA, 20 bp, Gossypium hirsutum
tcaaccattttttatccaac

SEQ ID NO: 26084 - DNA, 38 bp, Gossypium hirsutum
ctgaattaatggtgttcaattagttgtgtatttttttt

SEQ ID NO: 26085 - DNA, 19 bp, Gossypium hirsutum
gccgcgaagacatgtcgta

SEQ ID NO: 26086 - DNA, 18 bp, Gossypium hirsutum
cgaaagactgaagttcat

SEQ ID NO: 26087 - DNA, 16 bp, Gossypium hirsutum
aaagactggagttcat

SEQ ID NO: 26088 - DNA, 26 bp, Gossypium hirsutum
cccaacagaagaaataggtagcaaca

SEQ ID NO: 26089 - DNA, 26 bp, Gossypium hirsutum
caagaatcagacagaaatgggttgag

SEQ ID NO: 26090 - DNA, 17 bp, Gossypium hirsutum
ctgaggatgttatcatc

SEQ ID NO: 26091 - DNA, 17 bp, Gossypium hirsutum
ctgaggaagttatcatc

SEQ ID NO: 26092 - DNA, 25 bp, Gossypium hirsutum
gatcttctttttgctcttgctgctt

SEQ ID NO: 26093 - DNA, 24 bp, Gossypium hirsutum
gccatcaacaaacaaaccaaacct

SEQ ID NO: 26094 - DNA, 17 bp, Gossypium hirsutum
tttttggcttcaaatat

SEQ ID NO: 26095 - DNA, 15 bp, Gossypium hirsutum
tttggcatcaaatat

SEQ ID NO: 26096 - DNA, 35 bp, Gossypium hirsutum
actgttattttacctatggctacaaattgtaatga

SEQ ID NO: 26097 - DNA, 34 bp, Gossypium hirsutum
gcttaatggaacaattaaataatggtacatgaca

SEQ ID NO: 26098 - DNA, 18 bp, Gossypium hirsutum
atgtacaaggataaattt

SEQ ID NO: 26099 - DNA, 18 bp, Gossypium hirsutum
atgtacaaggatcaattt

SEQ ID NO: 26100 - DNA, 49 bp, Gossypium hirsutum
gaataaaaatattatgagaattcttataataagaatcccgtaaattgat

SEQ ID NO: 26101 - DNA, 25 bp, Gossypium hirsutum
gtccaccaacttaaccaatggtcta

SEQ ID NO: 26102 - DNA, 23 bp, Gossypium hirsutum
aattttaaattggaggtctttat

SEQ ID NO: 26103 - DNA, 21 bp, Gossypium hirsutum
ttttaaattggagctctttat

SEQ ID NO: 26104 - DNA, 26 bp, Gossypium hirsutum
tgacgtttaggcactcaatttagtca

SEQ ID NO: 26105 - DNA, 25 bp, Gossypium hirsutum
ggcgcaacctgtattcgtatctata

SEQ ID NO: 26106 - DNA, 24 bp, Gossypium hirsutum
ataatactttatttaaaaaaattg

SEQ ID NO: 26107 - DNA, 23 bp, Gossypium hirsutum
ataatactttatttaaaaaattg

SEQ ID NO: 26108 - DNA, 28 bp, Gossypium hirsutum
tcccatttccatttcagataaagggttt

SEQ ID NO: 26109 - DNA, 26 bp, Gossypium hirsutum
agttggtaaagacgaaggctttaagt

SEQ ID NO: 26110 - DNA, 21 bp, Gossypium hirsutum
attgtacatgatgggtcacga

SEQ ID NO: 26111 - DNA, 21 bp, Gossypium hirsutum
attgtacatgatgagtcacga

SEQ ID NO: 26112 - DNA, 30 bp, Gossypium hirsutum
cccataatcaagtctacacatgatgaaact

SEQ ID NO: 26113 - DNA, 28 bp, Gossypium hirsutum
gttccaatatactcgtgaagatgaagca

SEQ ID NO: 26114 - DNA, 14 bp, Gossypium hirsutum
cccattgcgaagac

SEQ ID NO: 26115 - DNA, 16 bp, Gossypium hirsutum
tccccattacgaagac

SEQ ID NO: 26116 - DNA, 25 bp, Gossypium hirsutum
gataaatcatcggctttgcgtgaaa

SEQ ID NO: 26117 - DNA, 25 bp, Gossypium hirsutum
gtgggagaagtagctatagcaacaa

SEQ ID NO: 26118 - DNA, 20 bp, Gossypium hirsutum
cttttttgtgtaagatatgg

SEQ ID NO: 26119 - DNA, 19 bp, Gossypium hirsutum
ttttttgtgtaaaatatgg

SEQ ID NO: 26120 - DNA, 32 bp, Gossypium hirsutum
tgttatatttgctacagatcagttggaatgaa

SEQ ID NO: 26121 - DNA, 31 bp, Gossypium hirsutum
accaattattaattttttctccctccctcaa

SEQ ID NO: 26122 - DNA, 20 bp, Gossypium hirsutum
tgaggattaaattgaaatta

SEQ ID NO: 26123 - DNA, 21 bp, Gossypium hirsutum
ttgaggattaaattaaaatta

SEQ ID NO: 26124 - DNA, 30 bp, Gossypium hirsutum
aaatgagtataccttaggcaatgacagaag

SEQ ID NO: 26125 - DNA, 23 bp, Gossypium hirsutum
gttcctctgcacatctgaaaggt

SEQ ID NO: 26126 - DNA, 18 bp, Gossypium hirsutum
ttatgcttacaatcattg

SEQ ID NO: 26127 - DNA, 18 bp, Gossypium hirsutum
ttatgcttacagtcattg

SEQ ID NO: 26128 - DNA, 25 bp, Gossypium hirsutum
ttgctttccccataagagtgtacaa

SEQ ID NO: 26129 - DNA, 23 bp, Gossypium hirsutum
ccaaccaagagggaaacgtatcc

SEQ ID NO: 26130 - DNA, 15 bp, Gossypium hirsutum
atgttgcaattaacc

SEQ ID NO: 26131 - DNA, 15 bp, Gossypium hirsutum
atgttgcagttaacc

SEQ ID NO: 26132 - DNA, 24 bp, Gossypium hirsutum
gaatggacgtattccgagatcact

SEQ ID NO: 26133 - DNA, 25 bp, Gossypium hirsutum
cgtggaagaaatctgtaaggtgcaa

SEQ ID NO: 26134 - DNA, 17 bp, Gossypium hirsutum
ctgtaaggtgcaatagt

SEQ ID NO: 26135 - DNA, 17 bp, Gossypium hirsutum
ctgtaaggtgcgatagt

SEQ ID NO: 26136 - DNA, 29 bp, Gossypium hirsutum
tctgaaagagtcgaaaatcccttaacaaa

SEQ ID NO: 26137 - DNA, 34 bp, Gossypium hirsutum
ccgttctgaagtgataatttagatttattccaat

SEQ ID NO: 26138 - DNA, 24 bp, Gossypium hirsutum
tttgattctttaactttataaaaa

SEQ ID NO: 26139 - DNA, 25 bp, Gossypium hirsutum
atttgattctttaattttataaaaa

SEQ ID NO: 26140 - DNA, 42 bp, Gossypium hirsutum
caagtttaagagttaaaaaatgtaaaaaattaaatggaaagc

SEQ ID NO: 26141 - DNA, 25 bp, Gossypium hirsutum
gtccccgtttttgtagattgcttac

SEQ ID NO: 26142 - DNA, 17 bp, Gossypium hirsutum
aagttgccagtgacatg

SEQ ID NO: 26143 - DNA, 14 bp, Gossypium hirsutum
ttgccagggacatg

SEQ ID NO: 26144 - DNA, 24 bp, Gossypium hirsutum
ccaaatggagggaaagatgaacag

SEQ ID NO: 26145 - DNA, 25 bp, Gossypium hirsutum
cagcacctatcaaacccaatgagat

SEQ ID NO: 26146 - DNA, 16 bp, Gossypium hirsutum
cctggagcaccaatat

SEQ ID NO: 26147 - DNA, 15 bp, Gossypium hirsutum
ctggagcagcaatat

SEQ ID NO: 26148 - DNA, 36 bp, Gossypium hirsutum
acagatttaaaagttgcaatagtaatatggttgaac

SEQ ID NO: 26149 - DNA, 30 bp, Gossypium hirsutum
catacatttccattaccatcttttctcgtt

SEQ ID NO: 26150 - DNA, 19 bp, Gossypium hirsutum
tctacgaatcagccggttt

SEQ ID NO: 26151 - DNA, 15 bp, Gossypium hirsutum
cgaatcggccggttt

SEQ ID NO: 26152 - DNA, 25 bp, Gossypium hirsutum
cttcgtcacgtgaaatacccatttt

SEQ ID NO: 26153 - DNA, 29 bp, Gossypium hirsutum
cagactattatgtcgtctacagatccaat

SEQ ID NO: 26154 - DNA, 18 bp, Gossypium hirsutum
tcaatcctgctccaatag

SEQ ID NO: 26155 - DNA, 20 bp, Gossypium hirsutum
agtcaatcctactccaatag

SEQ ID NO: 26156 - DNA, 25 bp, Gossypium hirsutum
gggtcgtgtctaatgtattgtcagt

SEQ ID NO: 26157 - DNA, 27 bp, Gossypium hirsutum
aacaccccaaatcttaaatctgatcca

SEQ ID NO: 26158 - DNA, 17 bp, Gossypium hirsutum
tttacccataaattttg

SEQ ID NO: 26159 - DNA, 16 bp, Gossypium hirsutum
tttacccataattttg

SEQ ID NO: 26160 - DNA, 34 bp, Gossypium hirsutum
ggcaaatttaatctttttggttatcttagtcagt

SEQ ID NO: 26161 - DNA, 25 bp, Gossypium hirsutum
tcaccgccaccattatttttacact

SEQ ID NO: 26162 - DNA, 17 bp, Gossypium hirsutum
cccttttggatgggcag

SEQ ID NO: 26163 - DNA, 17 bp, Gossypium hirsutum
cccttttgaatgggcag

SEQ ID NO: 26164 - DNA, 25 bp, Gossypium hirsutum
gctaaagttaagcaatgccttggaa

SEQ ID NO: 26165 - DNA, 20 bp, Gossypium hirsutum
agccagttcagcaagctcaa

SEQ ID NO: 26166 - DNA, 16 bp, Gossypium hirsutum
catttccataaatttg

SEQ ID NO: 26167 - DNA, 16 bp, Gossypium hirsutum
catttccatgaatttg

SEQ ID NO: 26168 - DNA, 26 bp, Gossypium hirsutum
gccaatacttcctagtgattctgtgt

SEQ ID NO: 26169 - DNA, 28 bp, Gossypium hirsutum
acatacactaccaagcaacaaaatttgg

SEQ ID NO: 26170 - DNA, 19 bp, Gossypium hirsutum
caaagcagagaatgggata

SEQ ID NO: 26171 - DNA, 17 bp, Gossypium hirsutum
aagcagagagtgggata

SEQ ID NO: 26172 - DNA, 27 bp, Gossypium hirsutum
caacctattaagttttcacccctgatg

SEQ ID NO: 26173 - DNA, 22 bp, Gossypium hirsutum
cgaggctcatgtgatacaccat

SEQ ID NO: 26174 - DNA, 24 bp, Gossypium hirsutum
ttgtcttattattttgtaaactat

SEQ ID NO: 26175 - DNA, 23 bp, Gossypium hirsutum
tgtcttattattttgtaagctat

SEQ ID NO: 26176 - DNA, 38 bp, Gossypium hirsutum
gttagagtaaaaagcaaactaatcgttttgttaaaatt

SEQ ID NO: 26177 - DNA, 25 bp, Gossypium hirsutum
tcccatcaaaagtgttcccgtaatt

SEQ ID NO: 26178 - DNA, 20 bp, Gossypium hirsutum
ttatgggtccattaagagta

SEQ ID NO: 26179 - DNA, 20 bp, Gossypium hirsutum
ttatgggtccattaatagta

SEQ ID NO: 26180 - DNA, 25 bp, Gossypium hirsutum
ccgtaatgataagggaaggatgagt

SEQ ID NO: 26181 - DNA, 23 bp, Gossypium hirsutum
gcaagccaacacacaaacatgag

SEQ ID NO: 26182 - DNA, 20 bp, Gossypium hirsutum
tttgcagttcaatataggtt

SEQ ID NO: 26183 - DNA, 20 bp, Gossypium hirsutum
tttgcagttcaatctaggtt

SEQ ID NO: 26184 - DNA, 25 bp, Gossypium hirsutum
cgaactgttgtatcttgcgaattca

SEQ ID NO: 26185 - DNA, 29 bp, Gossypium hirsutum
aggctaaaatgctgttaaaggttaaaacg

SEQ ID NO: 26186 - DNA, 23 bp, Gossypium hirsutum
tgtgttatattttcaacatactt

SEQ ID NO: 26187 - DNA, 23 bp, Gossypium hirsutum
tgtgttatattttcaacatagtt

SEQ ID NO: 26188 - DNA, 43 bp, Gossypium hirsutum
aaaaatacaacaaagctattaatgattaagagaataaagaaca

SEQ ID NO: 26189 - DNA, 29 bp, Gossypium hirsutum
gaaataccttttaccgctaaaagattcgg

SEQ ID NO: 26190 - DNA, 20 bp, Gossypium hirsutum
tcaattcgagagattgttta

SEQ ID NO: 26191 - DNA, 19 bp, Gossypium hirsutum
caattcgagaggttgttta

SEQ ID NO: 26192 - DNA, 27 bp, Gossypium hirsutum
tcgtttcaaaagaaggtagaacatcga

SEQ ID NO: 26193 - DNA, 35 bp, Gossypium hirsutum
tctagaatttttgattaggccaattagtacagttt

SEQ ID NO: 26194 - DNA, 19 bp, Gossypium hirsutum
actacgagtttgattctat

SEQ ID NO: 26195 - DNA, 19 bp, Gossypium hirsutum
actacgagtttgtttctat

SEQ ID NO: 26196 - DNA, 29 bp, Gossypium hirsutum
ggatcctctgttctgactttaacaattca

SEQ ID NO: 26197 - DNA, 24 bp, Gossypium hirsutum
ggccagctatccagactaatctct

SEQ ID NO: 26198 - DNA, 20 bp, Gossypium hirsutum
caaggtatcttacaaagtaa

SEQ ID NO: 26199 - DNA, 20 bp, Gossypium hirsutum
caaggtatcttaccaagtaa

SEQ ID NO: 26200 - DNA, 24 bp, Gossypium hirsutum
tgttcccttgggttaggttcagta

SEQ ID NO: 26201 - DNA, 50 bp, Gossypium hirsutum
gtttctttttatatttgaaagatgatatacacttctatattcatatttga

SEQ ID NO: 26202 - DNA, 20 bp, Gossypium hirsutum
catagatgtttaacaaagat

SEQ ID NO: 26203 - DNA, 19 bp, Gossypium hirsutum
atagatgtttagcaaagat

SEQ ID NO: 26204 - DNA, 34 bp, Gossypium hirsutum
accaccaaatcagactaacagtataaataaatca

SEQ ID NO: 26205 - DNA, 39 bp, Gossypium hirsutum
ctgttaaacgtgatgatatatgttttcttaatactcatg

SEQ ID NO: 26206 - DNA, 18 bp, Gossypium hirsutum
tgacatatagcattattg

SEQ ID NO: 26207 - DNA, 15 bp, Gossypium hirsutum
catatggcattattg

SEQ ID NO: 26208 - DNA, 28 bp, Gossypium hirsutum
agaataccaacaaatcagtgtcatgtgt

SEQ ID NO: 26209 - DNA, 26 bp, Gossypium hirsutum
ctacgatgtgggtgaaagaaaatgtt

SEQ ID NO: 26210 - DNA, 22 bp, Gossypium hirsutum
aagtgacataaacttgatataa

SEQ ID NO: 26211 - DNA, 24 bp, Gossypium hirsutum
aaaagtgacataaactttatataa

SEQ ID NO: 26212 - DNA, 49 bp, Gossypium hirsutum
cctgattcttaagttaattatattatggattagagatttagtttgaatt

SEQ ID NO: 26213 - DNA, 35 bp, Gossypium hirsutum
cgagttaaaaaagataattgattcaagacttagct

SEQ ID NO: 26214 - DNA, 16 bp, Gossypium hirsutum
tgaaacacgataaaac

SEQ ID NO: 26215 - DNA, 18 bp, Gossypium hirsutum
attgaaacaagataaaac

SEQ ID NO: 26216 - DNA, 36 bp, Gossypium hirsutum
gtattagaactgaattccaaagtaaaatggattcat

SEQ ID NO: 26217 - DNA, 21 bp, Gossypium hirsutum
cctctaacactcgccctgatg

SEQ ID NO: 26218 - DNA, 19 bp, Gossypium hirsutum
cacatagctacaatccagt

SEQ ID NO: 26219 - DNA, 19 bp, Gossypium hirsutum
cacatagctacagtccagt

SEQ ID NO: 26220 - DNA, 19 bp, Gossypium hirsutum
tgggccctttgttgctcat

SEQ ID NO: 26221 - DNA, 25 bp, Gossypium hirsutum
ccattgaaaacgaatggtgaaggtt

SEQ ID NO: 26222 - DNA, 16 bp, Gossypium hirsutum
ttccggaagcttttta

SEQ ID NO: 26223 - DNA, 15 bp, Gossypium hirsutum
tccggaagattttta

SEQ ID NO: 26224 - DNA, 27 bp, Gossypium hirsutum
gctaccttcttaagggacgttgttatt

SEQ ID NO: 26225 - DNA, 25 bp, Gossypium hirsutum
tgccatgtgacaaataggtgattga

SEQ ID NO: 26226 - DNA, 20 bp, Gossypium hirsutum
atttaatatgacaaaatatg

SEQ ID NO: 26227 - DNA, 20 bp, Gossypium hirsutum
catttaatatgacaaatatg

SEQ ID NO: 26228 - DNA, 35 bp, Gossypium hirsutum
acaagtgggagaattattttaatatatggttgaca

SEQ ID NO: 26229 - DNA, 30 bp, Gossypium hirsutum
tctcatggaataatagttgtttggtgttga

SEQ ID NO: 26230 - DNA, 16 bp, Gossypium hirsutum
tgagctgttgaagtca

SEQ ID NO: 26231 - DNA, 17 bp, Gossypium hirsutum
ttgagctgttggagtca

SEQ ID NO: 26232 - DNA, 25 bp, Gossypium hirsutum
tgcaagtgcattgaatgtccaaatt

SEQ ID NO: 26233 - DNA, 31 bp, Gossypium hirsutum
agttagttagctctgaaagattatttggcaa

SEQ ID NO: 26234 - DNA, 16 bp, Gossypium hirsutum
cggtacagtggattaa

SEQ ID NO: 26235 - DNA, 17 bp, Gossypium hirsutum
tcggtacagttgattaa

SEQ ID NO: 26236 - DNA, 37 bp, Gossypium hirsutum
cgatttctgacattgattgttagattgaattgaattt

SEQ ID NO: 26237 - DNA, 29 bp, Gossypium hirsutum
gcatcacaagcaaaaacttgaattaccat

SEQ ID NO: 26238 - DNA, 19 bp, Gossypium hirsutum
ctttagcatcatggattag

SEQ ID NO: 26239 - DNA, 19 bp, Gossypium hirsutum
ctttagcatcatagattag

SEQ ID NO: 26240 - DNA, 28 bp, Gossypium hirsutum
ccggatgggtatgtttaaatcttgtttc

SEQ ID NO: 26241 - DNA, 31 bp, Gossypium hirsutum
gagattcagttgttgaattggtacaatttgt

SEQ ID NO: 26242 - DNA, 15 bp, Gossypium hirsutum
ccaccgaaaaataaa

SEQ ID NO: 26243 - DNA, 16 bp, Gossypium hirsutum
tccacctaaaaataaa

SEQ ID NO: 26244 - DNA, 24 bp, Gossypium hirsutum
ctcaaatcaaaggcctcaattgca

SEQ ID NO: 26245 - DNA, 30 bp, Gossypium hirsutum
ctcgtgtttctatgtcttcaatttctttgt

SEQ ID NO: 26246 - DNA, 18 bp, Gossypium hirsutum
ttgcaacattctttaacc

SEQ ID NO: 26247 - DNA, 19 bp, Gossypium hirsutum
attgcaaaattctttaacc

SEQ ID NO: 26248 - DNA, 25 bp, Gossypium hirsutum
agatggcagagaaaatgttcccaat

SEQ ID NO: 26249 - DNA, 30 bp, Gossypium hirsutum
gagaatcatattgaagactttacgagagca

SEQ ID NO: 26250 - DNA, 16 bp, Gossypium hirsutum
actttgcgtacaattg

SEQ ID NO: 26251 - DNA, 18 bp, Gossypium hirsutum
aaactttgcatacaattg

SEQ ID NO: 26252 - DNA, 29 bp, Gossypium hirsutum
catgtccaaaaaagtgtaattccttcagt

SEQ ID NO: 26253 - DNA, 24 bp, Gossypium hirsutum
tgagtttgtgttgtgtagcgacaa

SEQ ID NO: 26254 - DNA, 23 bp, Gossypium hirsutum
atagaggtataagttaatggagc

SEQ ID NO: 26255 - DNA, 23 bp, Gossypium hirsutum
atagaggtataagttaatagagc

SEQ ID NO: 26256 - DNA, 29 bp, Gossypium hirsutum
ttggaaaggaatagggatgatgtgaaatt

SEQ ID NO: 26257 - DNA, 29 bp, Gossypium hirsutum
ccccagctctaagttttccttttttctat

SEQ ID NO: 26258 - DNA, 24 bp, Gossypium hirsutum
taatttgcaaaaaaatataataat

SEQ ID NO: 26259 - DNA, 22 bp, Gossypium hirsutum
aatttgcaaaaaatataataat

SEQ ID NO: 26260 - DNA, 29 bp, Gossypium hirsutum
cattgaaaatacacggcaaaaagaatgtt

SEQ ID NO: 26261 - DNA, 21 bp, Gossypium hirsutum
tgagcctttctggccatcaac

SEQ ID NO: 26262 - DNA, 22 bp, Gossypium hirsutum
ctttgatttttttttcaaactg

SEQ ID NO: 26263 - DNA, 21 bp, Gossypium hirsutum
ctttgattttttttcaaactg

SEQ ID NO: 26264 - DNA, 43 bp, Gossypium hirsutum
agattaaaaccttgaatttatttattaaatttgccagaaaaag

SEQ ID NO: 26265 - DNA, 45 bp, Gossypium hirsutum
gaggaccaaaaaatgtaatttaaccactttaattaataaatttac

SEQ ID NO: 26266 - DNA, 22 bp, Gossypium hirsutum
caattaattaaagaccaattta

SEQ ID NO: 26267 - DNA, 23 bp, Gossypium hirsutum
tcaattaattaaagactaattta

SEQ ID NO: 26268 - DNA, 35 bp, Gossypium hirsutum
gctataaagtggaccatgcatgattaaattaaata

SEQ ID NO: 26269 - DNA, 25 bp, Gossypium hirsutum
gtgttgttggttatcacgtcaatct

SEQ ID NO: 26270 - DNA, 16 bp, Gossypium hirsutum
aaggtctccgattcga

SEQ ID NO: 26271 - DNA, 16 bp, Gossypium hirsutum
aaggtctccggttcga

SEQ ID NO: 26272 - DNA, 28 bp, Gossypium hirsutum
agaaaattaatatcaaaatggcgtcgcc

SEQ ID NO: 26273 - DNA, 29 bp, Gossypium hirsutum
cgtctactatccgtttagtctctttatgg

SEQ ID NO: 26274 - DNA, 23 bp, Gossypium hirsutum
atactccttattaaagtgatttt

SEQ ID NO: 26275 - DNA, 19 bp, Gossypium hirsutum
tccttattagagtgatttt

SEQ ID NO: 26276 - DNA, 30 bp, Gossypium hirsutum
caaataaactagttgtctttagccattgga

SEQ ID NO: 26277 - DNA, 25 bp, Gossypium hirsutum
tccccaatgcatcttcttctttgat

SEQ ID NO: 26278 - DNA, 19 bp, Gossypium hirsutum
tcctgttaaatcattattg

SEQ ID NO: 26279 - DNA, 19 bp, Gossypium hirsutum
tcctgttaaataattattg

SEQ ID NO: 26280 - DNA, 25 bp, Gossypium hirsutum
gccttggaagttgaaggattgactt

SEQ ID NO: 26281 - DNA, 30 bp, Gossypium hirsutum
gctggacaaaaatagacatgagataagaga

SEQ ID NO: 26282 - DNA, 16 bp, Gossypium hirsutum
aaatgccctttttttc

SEQ ID NO: 26283 - DNA, 15 bp, Gossypium hirsutum
aaatgcccttttttc

SEQ ID NO: 26284 - DNA, 32 bp, Gossypium hirsutum
gatggactaaattttggcttgattttttgttt

SEQ ID NO: 26285 - DNA, 25 bp, Gossypium hirsutum
ccccaatcttgattgtcgcataact

SEQ ID NO: 26286 - DNA, 17 bp, Gossypium hirsutum
aatgggaaagggatgac

SEQ ID NO: 26287 - DNA, 16 bp, Gossypium hirsutum
atgggaaagagatgac

SEQ ID NO: 26288 - DNA, 27 bp, Gossypium hirsutum
tgaagactgagaggaaaaagcaatgaa

SEQ ID NO: 26289 - DNA, 20 bp, Gossypium hirsutum
tggcagaaaggtgggaaagg

SEQ ID NO: 26290 - DNA, 15 bp, Gossypium hirsutum
acctcgtcaacttat

SEQ ID NO: 26291 - DNA, 13 bp, Gossypium hirsutum
ctcgccaacttat

SEQ ID NO: 26292 - DNA, 25 bp, Gossypium hirsutum
gcagttaagtatgtccctccagaat

SEQ ID NO: 26293 - DNA, 40 bp, Gossypium hirsutum
gagaaaatgaaacatgtaaaaatttagttactacttctga

SEQ ID NO: 26294 - DNA, 25 bp, Gossypium hirsutum
atctaattctgaaaattttatattt

SEQ ID NO: 26295 - DNA, 23 bp, Gossypium hirsutum
ctaattctgaaaatcttatattt

SEQ ID NO: 26296 - DNA, 24 bp, Gossypium hirsutum
ctactggatggttggactggaatc

SEQ ID NO: 26297 - DNA, 31 bp, Gossypium hirsutum
tgcttgaacgaacaataaataaacacatcaa

SEQ ID NO: 26298 - DNA, 20 bp, Gossypium hirsutum
aaccgattaaaagactaatt

SEQ ID NO: 26299 - DNA, 20 bp, Gossypium hirsutum
aaccgattaaaaaactaatt

SEQ ID NO: 26300 - DNA, 30 bp, Gossypium hirsutum
agtagataaacctaaatgtgcccttagtct

SEQ ID NO: 26301 - DNA, 23 bp, Gossypium hirsutum
gactcgtaagccatccaattcga

SEQ ID NO: 26302 - DNA, 18 bp, Gossypium hirsutum
cggatcaaattcaagttg

SEQ ID NO: 26303 - DNA, 18 bp, Gossypium hirsutum
cggatcaaattcgagttg

SEQ ID NO: 26304 - DNA, 27 bp, Gossypium hirsutum
ggtgctcataaactatggagattgact

SEQ ID NO: 26305 - DNA, 25 bp, Gossypium hirsutum
ccagaataaaagcagtccagttcca

SEQ ID NO: 26306 - DNA, 16 bp, Gossypium hirsutum
tcactccacatgtttc

SEQ ID NO: 26307 - DNA, 15 bp, Gossypium hirsutum
cactccacgtgtttc

SEQ ID NO: 26308 - DNA, 30 bp, Gossypium hirsutum
catgaatgccaacaattatagtttctgtga

SEQ ID NO: 26309 - DNA, 25 bp, Gossypium hirsutum
cgcataaacctgtatcgactaacga

SEQ ID NO: 26310 - DNA, 18 bp, Gossypium hirsutum
catcgggtagaggtgtaa

SEQ ID NO: 26311 - DNA, 18 bp, Gossypium hirsutum
catcgggtaaaggtgtaa

SEQ ID NO: 26312 - DNA, 25 bp, Gossypium hirsutum
tggtatggtggtaatggatcaagga

SEQ ID NO: 26313 - DNA, 25 bp, Gossypium hirsutum
gccgagttatatgcgatgatgaagt

SEQ ID NO: 26314 - DNA, 16 bp, Gossypium hirsutum
cctcttcacctttttc

SEQ ID NO: 26315 - DNA, 15 bp, Gossypium hirsutum
ctcttcacatttttc

SEQ ID NO: 26316 - DNA, 22 bp, Gossypium hirsutum
gaacatgaaggtgtcgcattcc

SEQ ID NO: 26317 - DNA, 20 bp, Gossypium hirsutum
ctcccgacaaacccgtactc

SEQ ID NO: 26318 - DNA, 16 bp, Gossypium hirsutum
caccagttttcattgc

SEQ ID NO: 26319 - DNA, 15 bp, Gossypium hirsutum
accagctttcattgc

SEQ ID NO: 26320 - DNA, 25 bp, Gossypium hirsutum
ccatacgccattacaagcatttcag

SEQ ID NO: 26321 - DNA, 16 bp, Gossypium hirsutum
acccccgtggtggtct

SEQ ID NO: 26322 - DNA, 18 bp, Gossypium hirsutum
ctgctttccagttattat

SEQ ID NO: 26323 - DNA, 18 bp, Gossypium hirsutum
ctgctttccaattattat

SEQ ID NO: 26324 - DNA, 26 bp, Gossypium hirsutum
ggtttcctcttatgaccgaaagttca

SEQ ID NO: 26325 - DNA, 29 bp, Gossypium hirsutum
ttcaaactatgatagcaactggagaatcc

SEQ ID NO: 26326 - DNA, 20 bp, Gossypium hirsutum
ccttatcaatgctaagttag

SEQ ID NO: 26327 - DNA, 19 bp, Gossypium hirsutum
cttatcaatgctgagttag

SEQ ID NO: 26328 - DNA, 27 bp, Gossypium hirsutum
ctatctagacaagacctatgggaggat

SEQ ID NO: 26329 - DNA, 41 bp, Gossypium hirsutum
ccaatctttgtactataagttgtggatttaatttatgtact

SEQ ID NO: 26330 - DNA, 18 bp, Gossypium hirsutum
tcacatgtgtaacatcat

SEQ ID NO: 26331 - DNA, 18 bp, Gossypium hirsutum
tcacatgtgtaatatcat

SEQ ID NO: 26332 - DNA, 47 bp, Gossypium hirsutum
tctgttagattattattagtctcatactctatgtaaattatggattt

SEQ ID NO: 26333 - DNA, 30 bp, Gossypium hirsutum
cggttaaaaatcactaatgaaaagatgcca

SEQ ID NO: 26334 - DNA, 19 bp, Gossypium hirsutum
agggtcaaagttgttatta

SEQ ID NO: 26335 - DNA, 19 bp, Gossypium hirsutum
agggtcaaagttattatta

SEQ ID NO: 26336 - DNA, 39 bp, Gossypium hirsutum
caacggtaaacattgagatttttttagaattaagactaa

SEQ ID NO: 26337 - DNA, 26 bp, Gossypium hirsutum
gcagtgatgctaaattaccagaagct

SEQ ID NO: 26338 - DNA, 23 bp, Gossypium hirsutum
ccaattttaattagttattttct

SEQ ID NO: 26339 - DNA, 22 bp, Gossypium hirsutum
caattttaattagttgttttct

SEQ ID NO: 26340 - DNA, 34 bp, Gossypium hirsutum
tgtccgtgattcatagctaatgattatttaaaca

SEQ ID NO: 26341 - DNA, 28 bp, Gossypium hirsutum
ctaagtcacaaggcattcgatagctata

SEQ ID NO: 26342 - DNA, 21 bp, Gossypium hirsutum
ttagacaatgatttaaaatga

SEQ ID NO: 26343 - DNA, 21 bp, Gossypium hirsutum
ttagacaatgatttagaatga

SEQ ID NO: 26344 - DNA, 27 bp, Gossypium hirsutum
gtcacatcaaattgaaatggcaagaga

SEQ ID NO: 26345 - DNA, 29 bp, Gossypium hirsutum
agttacccgtttagatcagataagctaga

SEQ ID NO: 26346 - DNA, 21 bp, Gossypium hirsutum
catacttaactaataactttg

SEQ ID NO: 26347 - DNA, 20 bp, Gossypium hirsutum
atacttaactaagaactttg

SEQ ID NO: 26348 - DNA, 27 bp, Gossypium hirsutum
atgacatacgatttgatgacacctgaa

SEQ ID NO: 26349 - DNA, 27 bp, Gossypium hirsutum
ggtgcaaagtgacacatggtaatctaa

SEQ ID NO: 26350 - DNA, 18 bp, Gossypium hirsutum
ccccatatttgaacgtac

SEQ ID NO: 26351 - DNA, 19 bp, Gossypium hirsutum
accccatattttaacgtac

SEQ ID NO: 26352 - DNA, 39 bp, Gossypium hirsutum
tgacacttactcttggtttagtcttatttgataaattag

SEQ ID NO: 26353 - DNA, 39 bp, Gossypium hirsutum
gttatgaatgtcaatgaaattaatcaaagtattcgaact

SEQ ID NO: 26354 - DNA, 21 bp, Gossypium hirsutum
catttaactcatcttaaactt

SEQ ID NO: 26355 - DNA, 20 bp, Gossypium hirsutum
atttaactcatcataaactt

SEQ ID NO: 26356 - DNA, 26 bp, Gossypium hirsutum
agaagtagtttcctagctttgcaaca

SEQ ID NO: 26357 - DNA, 28 bp, Gossypium hirsutum
acaatagagtgaccacttcgtaacaaaa

SEQ ID NO: 26358 - DNA, 26 bp, Gossypium hirsutum
tgtttcagattatattttagttattt

SEQ ID NO: 26359 - DNA, 24 bp, Gossypium hirsutum
tttcagattatattttaattattt

SEQ ID NO: 26360 - DNA, 27 bp, Gossypium hirsutum
gtgtgcagtgacagcataatttagtta

SEQ ID NO: 26361 - DNA, 26 bp, Gossypium hirsutum
tcttcttagaaactccgatggactct

SEQ ID NO: 26362 - DNA, 17 bp, Gossypium hirsutum
accaatcctgtggacac

SEQ ID NO: 26363 - DNA, 16 bp, Gossypium hirsutum
ccaatccagtggacac

SEQ ID NO: 26364 - DNA, 22 bp, Gossypium hirsutum
gtagtagtcgatggagcagagc

SEQ ID NO: 26365 - DNA, 29 bp, Gossypium hirsutum
gggaaaacttactcttcattcttctgaca

SEQ ID NO: 26366 - DNA, 16 bp, Gossypium hirsutum
cccttttgggtacctg

SEQ ID NO: 26367 - DNA, 16 bp, Gossypium hirsutum
cccttttgagtacctg

SEQ ID NO: 26368 - DNA, 27 bp, Gossypium hirsutum
cgaagactgcatcaaaatgaactatgg

SEQ ID NO: 26369 - DNA, 27 bp, Gossypium hirsutum
gtatttatcaagaaaagctgggttggg

SEQ ID NO: 26370 - DNA, 15 bp, Gossypium hirsutum
cctgatcgtaaaatg

SEQ ID NO: 26371 - DNA, 15 bp, Gossypium hirsutum
cctgatcataaaatg

SEQ ID NO: 26372 - DNA, 24 bp, Gossypium hirsutum
caagcaattcttggaccctcaaag

SEQ ID NO: 26373 - DNA, 34 bp, Gossypium hirsutum
tggtaaagttaacataaaagcataagggtaaact

SEQ ID NO: 26374 - DNA, 24 bp, Gossypium hirsutum
aagttttttaatgagttcttattt

SEQ ID NO: 26375 - DNA, 24 bp, Gossypium hirsutum
aagttttttaatgagtttttattt

SEQ ID NO: 26376 - DNA, 34 bp, Gossypium hirsutum
tgagagtgacaaaattaacaaaaaaaattggtga

SEQ ID NO: 26377 - DNA, 32 bp, Gossypium hirsutum
catgcaatcatcaaaaaatatagagggaagag

SEQ ID NO: 26378 - DNA, 21 bp, Gossypium hirsutum
attgacaagtactaacagaaa

SEQ ID NO: 26379 - DNA, 19 bp, Gossypium hirsutum
tgacaagtacaaacagaaa

SEQ ID NO: 26380 - DNA, 25 bp, Gossypium hirsutum
gttagagcacaatgtgaggtgacta

SEQ ID NO: 26381 - DNA, 18 bp, Gossypium hirsutum
gtgcctcactgcctcact

SEQ ID NO: 26382 - DNA, 19 bp, Gossypium hirsutum
ctaagggctcctttggatt

SEQ ID NO: 26383 - DNA, 19 bp, Gossypium hirsutum
ctaagggctcctttagatt

SEQ ID NO: 26384 - DNA, 29 bp, Gossypium hirsutum
gcttcccagttacctatacaaaaatgatg

SEQ ID NO: 26385 - DNA, 24 bp, Gossypium hirsutum
ctccaaggaacgcacttactatcc

SEQ ID NO: 26386 - DNA, 20 bp, Gossypium hirsutum
ctcactcattcctattacac

SEQ ID NO: 26387 - DNA, 18 bp, Gossypium hirsutum
cactcattcctgttacac

SEQ ID NO: 26388 - DNA, 24 bp, Gossypium hirsutum
gccaaccttttcaaagaagctgat

SEQ ID NO: 26389 - DNA, 28 bp, Gossypium hirsutum
ggatacttatggaaagcttcttgtacgt

SEQ ID NO: 26390 - DNA, 24 bp, Gossypium hirsutum
atcgattaacatttttttatttaa

SEQ ID NO: 26391 - DNA, 23 bp, Gossypium hirsutum
atcgattaacattttttatttaa

SEQ ID NO: 26392 - DNA, 24 bp, Gossypium hirsutum
ccccaaagtttgataccccaatct

SEQ ID NO: 26393 - DNA, 35 bp, Gossypium hirsutum
gccatactgatagatcagtttttctttattagact

SEQ ID NO: 26394 - DNA, 18 bp, Gossypium hirsutum
cttgagctgtgactgtaa

SEQ ID NO: 26395 - DNA, 19 bp, Gossypium hirsutum
tcttgagctgtaactgtaa

SEQ ID NO: 26396 - DNA, 26 bp, Gossypium hirsutum
cggttttattctgtcaccatctttgg

SEQ ID NO: 26397 - DNA, 26 bp, Gossypium hirsutum
aaacaccaaaccaagctcaaaaatga

SEQ ID NO: 26398 - DNA, 20 bp, Gossypium hirsutum
ctctacatttacccatatgc

SEQ ID NO: 26399 - DNA, 18 bp, Gossypium hirsutum
ctacatttacgcatatgc

SEQ ID NO: 26400 - DNA, 22 bp, Gossypium hirsutum
tggccttatcgggtgttaaacc

SEQ ID NO: 26401 - DNA, 45 bp, Gossypium hirsutum
caatttaattttttctcaaaaaagaaaacagttatgaatgttatg

SEQ ID NO: 26402 - DNA, 19 bp, Gossypium hirsutum
ttttgtccttcaacattga

SEQ ID NO: 26403 - DNA, 17 bp, Gossypium hirsutum
ttgtccttcaagattga

SEQ ID NO: 26404 - DNA, 48 bp, Gossypium hirsutum
tgatcattactcatctacaagtaaaaaaatatactttaaatctaagtt

SEQ ID NO: 26405 - DNA, 25 bp, Gossypium hirsutum
aaccggtttcaacactaaagaagga

SEQ ID NO: 26406 - DNA, 19 bp, Gossypium hirsutum
ttgtcagtacaaattctta

SEQ ID NO: 26407 - DNA, 19 bp, Gossypium hirsutum
ttgtcagtacaatttctta

SEQ ID NO: 26408 - DNA, 33 bp, Gossypium hirsutum
ggatgtgagatatgtgaaattctttgaaatacg

SEQ ID NO: 26409 - DNA, 26 bp, Gossypium hirsutum
tggagggaaatttctcatgtgaaaca

SEQ ID NO: 26410 - DNA, 19 bp, Gossypium hirsutum
ccatatatgtgtgatgttt

SEQ ID NO: 26411 - DNA, 19 bp, Gossypium hirsutum
ccatatatgtctgatgttt

SEQ ID NO: 26412 - DNA, 55 bp, Gossypium hirsutum
ccgtgacaatttatatattatcaatttatcatctataaaattaaaggttaataac

SEQ ID NO: 26413 - DNA, 33 bp, Gossypium hirsutum
ttcaaatttcccataacgttaacaacattatcc

SEQ ID NO: 26414 - DNA, 20 bp, Gossypium hirsutum
taaggaaactagtggcccgt

SEQ ID NO: 26415 - DNA, 20 bp, Gossypium hirsutum
taaggaaactagtgacccgt

SEQ ID NO: 26416 - DNA, 34 bp, Gossypium hirsutum
ccaattgaaagacattgattgataaaatgtcaca

SEQ ID NO: 26417 - DNA, 25 bp, Gossypium hirsutum
caactacgagtcatggcatcaaatg

SEQ ID NO: 26418 - DNA, 21 bp, Gossypium hirsutum
ccttaatattatcgagagctt

SEQ ID NO: 26419 - DNA, 21 bp, Gossypium hirsutum
ccttaatattatcaagagctt

SEQ ID NO: 26420 - DNA, 39 bp, Gossypium hirsutum
acttaaaccaaagtattataaattacattcacgttttgt

SEQ ID NO: 26421 - DNA, 22 bp, Gossypium hirsutum
ggcatgggacaagaagtcaaac

SEQ ID NO: 26422 - DNA, 19 bp, Gossypium hirsutum
ccccttttttttcatattt

SEQ ID NO: 26423 - DNA, 18 bp, Gossypium hirsutum
cccctttttttcatattt

SEQ ID NO: 26424 - DNA, 35 bp, Gossypium hirsutum
ttcttatgacataaggaactacattgaagactttt

SEQ ID NO: 26425 - DNA, 31 bp, Gossypium hirsutum
tcgaacaaatcattaatacgaggtaacaaga

SEQ ID NO: 26426 - DNA, 20 bp, Gossypium hirsutum
atagttgagctaccattaag

SEQ ID NO: 26427 - DNA, 19 bp, Gossypium hirsutum
atagttgagctaccttaag

SEQ ID NO: 26428 - DNA, 29 bp, Gossypium hirsutum
ccgtaaagaagaaatatgggtcaatgaga

SEQ ID NO: 26429 - DNA, 25 bp, Gossypium hirsutum
acgaaatctcaaccaactcatcact

SEQ ID NO: 26430 - DNA, 17 bp, Gossypium hirsutum
ccatatggtaaatattt

SEQ ID NO: 26431 - DNA, 16 bp, Gossypium hirsutum
catatggtcaatattt

SEQ ID NO: 26432 - DNA, 29 bp, Gossypium hirsutum
tctctattgtggattttgtttgtgctaga

SEQ ID NO: 26433 - DNA, 30 bp, Gossypium hirsutum
gactcaaacatcactttttaagctcaatct

SEQ ID NO: 26434 - DNA, 18 bp, Gossypium hirsutum
ctgattaagctcatttat

SEQ ID NO: 26435 - DNA, 18 bp, Gossypium hirsutum
ctgattaagctcgtttat

SEQ ID NO: 26436 - DNA, 25 bp, Gossypium hirsutum
gcccacaaacctaattaagcattcc

SEQ ID NO: 26437 - DNA, 21 bp, Gossypium hirsutum
tcgagcgatggtaggtgagaa

SEQ ID NO: 26438 - DNA, 19 bp, Gossypium hirsutum
cagaaggttaagatgcatc

SEQ ID NO: 26439 - DNA, 19 bp, Gossypium hirsutum
cagaaggttaagatacatc

SEQ ID NO: 26440 - DNA, 28 bp, Gossypium hirsutum
aaatctcactcaattgacagtcgatgat

SEQ ID NO: 26441 - DNA, 33 bp, Gossypium hirsutum
gttctgatttatgaattgttggatggtatgtat

SEQ ID NO: 26442 - DNA, 18 bp, Gossypium hirsutum
catttcacattcgtcttc

SEQ ID NO: 26443 - DNA, 17 bp, Gossypium hirsutum
catttcacatcgtcttc

SEQ ID NO: 26444 - DNA, 26 bp, Gossypium hirsutum
caccgcaatagaacattaactgaaca

SEQ ID NO: 26445 - DNA, 25 bp, Gossypium hirsutum
acgatgagtaccacaacacattcaa

SEQ ID NO: 26446 - DNA, 19 bp, Gossypium hirsutum
ttcgagtttgaacagagtt

SEQ ID NO: 26447 - DNA, 19 bp, Gossypium hirsutum
ttcgagtttgaaccgagtt

SEQ ID NO: 26448 - DNA, 27 bp, Gossypium hirsutum
gccttggcatattattccatgtttagg

SEQ ID NO: 26449 - DNA, 25 bp, Gossypium hirsutum
ccaaccaaacctctaaacccactaa

SEQ ID NO: 26450 - DNA, 17 bp, Gossypium hirsutum
aatgggtcatgggttaa

SEQ ID NO: 26451 - DNA, 19 bp, Gossypium hirsutum
taaatgggtcataggttaa

SEQ ID NO: 26452 - DNA, 27 bp, Gossypium hirsutum
ttgggttttgtaatgagtttgggtaga

SEQ ID NO: 26453 - DNA, 20 bp, Gossypium hirsutum
gcttccgtctgcaccaaatt

SEQ ID NO: 26454 - DNA, 17 bp, Gossypium hirsutum
tcttgaacacacagttc

SEQ ID NO: 26455 - DNA, 19 bp, Gossypium hirsutum
tttcttgaacacccagttc

SEQ ID NO: 26456 - DNA, 25 bp, Gossypium hirsutum
ggagatggtcaacttgccataagaa

SEQ ID NO: 26457 - DNA, 24 bp, Gossypium hirsutum
gcctatcaccacctacaactacga

SEQ ID NO: 26458 - DNA, 17 bp, Gossypium hirsutum
caaagttgcgtgagttg

SEQ ID NO: 26459 - DNA, 17 bp, Gossypium hirsutum
caaagttgcgtcagttg

SEQ ID NO: 26460 - DNA, 20 bp, Gossypium hirsutum
tcgagtggtacggcaagaac

SEQ ID NO: 26461 - DNA, 29 bp, Gossypium hirsutum
gttgagagagaccattttgcttattttca

SEQ ID NO: 26462 - DNA, 23 bp, Gossypium hirsutum
aaaggatatttacaacaacatat

SEQ ID NO: 26463 - DNA, 21 bp, Gossypium hirsutum
aggatatttacaacaatatat

SEQ ID NO: 26464 - DNA, 33 bp, Gossypium hirsutum
cgaatcgagttgaattttacaattcgaataact

SEQ ID NO: 26465 - DNA, 28 bp, Gossypium hirsutum
tgatcaatttaaagtgggaatccaagct

SEQ ID NO: 26466 - DNA, 17 bp, Gossypium hirsutum
ctttccttgtggaaatt

SEQ ID NO: 26467 - DNA, 17 bp, Gossypium hirsutum
ctttccttatggaaatt

SEQ ID NO: 26468 - DNA, 25 bp, Gossypium hirsutum
ctggagtcaggcactagaaattcaa

SEQ ID NO: 26469 - DNA, 26 bp, Gossypium hirsutum
tgataaaattacactttggcccccaa

SEQ ID NO: 26470 - DNA, 21 bp, Gossypium hirsutum
tgaagggattaacattatgtt

SEQ ID NO: 26471 - DNA, 19 bp, Gossypium hirsutum
aagggattaacataatgtt

SEQ ID NO: 26472 - DNA, 33 bp, Gossypium hirsutum
ggcgaatctagaaaattttagaagggattagaa

SEQ ID NO: 26473 - DNA, 29 bp, Gossypium hirsutum
ctggtaacttatcaacttgactctcgatt

SEQ ID NO: 26474 - DNA, 17 bp, Gossypium hirsutum
aaaagtcagaaaagttg

SEQ ID NO: 26475 - DNA, 18 bp, Gossypium hirsutum
aaaaagtcaaaaaagttg

SEQ ID NO: 26476 - DNA, 26 bp, Gossypium hirsutum
accaatcaagaggtctttacaaggtt

SEQ ID NO: 26477 - DNA, 25 bp, Gossypium hirsutum
gcatgccttagtttgctttcttctt

SEQ ID NO: 26478 - DNA, 23 bp, Gossypium hirsutum
catataaagagttatgataaaag

SEQ ID NO: 26479 - DNA, 23 bp, Gossypium hirsutum
catataaagagttataataaaag

SEQ ID NO: 26480 - DNA, 29 bp, Gossypium hirsutum
gaaagtgcaccacattatcctagtcttat

SEQ ID NO: 26481 - DNA, 25 bp, Gossypium hirsutum
cctgcgtgtccattaatttgaacaa

SEQ ID NO: 26482 - DNA, 19 bp, Gossypium hirsutum
ttgtgtgatgttcatagaa

SEQ ID NO: 26483 - DNA, 19 bp, Gossypium hirsutum
ttgtgtgatgtacatagaa

SEQ ID NO: 26484 - DNA, 25 bp, Gossypium hirsutum
gtagttacatagaccatgccacgtt

SEQ ID NO: 26485 - DNA, 24 bp, Gossypium hirsutum
ggtgaagataggaaatggccactt

SEQ ID NO: 26486 - DNA, 17 bp, Gossypium hirsutum
tctccctttctttctgc

SEQ ID NO: 26487 - DNA, 16 bp, Gossypium hirsutum
ctccctttccttctgc

SEQ ID NO: 26488 - DNA, 27 bp, Gossypium hirsutum
gaaaccagcttgttacttgtaggacta

SEQ ID NO: 26489 - DNA, 48 bp, Gossypium hirsutum
cttaatgtcataaaacgtattattttaatgaaatcactagtatatgat

SEQ ID NO: 26490 - DNA, 16 bp, Gossypium hirsutum
ctaagtcccaaaaaat

SEQ ID NO: 26491 - DNA, 13 bp, Gossypium hirsutum
agtccccaaaaat

SEQ ID NO: 26492 - DNA, 18 bp, Gossypium hirsutum
tgcaggcccgttcttgac

SEQ ID NO: 26493 - DNA, 25 bp, Gossypium hirsutum
gccgcgcataatgtaataagcatat

SEQ ID NO: 26494 - DNA, 20 bp, Gossypium hirsutum
cagtactcaaatcacgttca

SEQ ID NO: 26495 - DNA, 19 bp, Gossypium hirsutum
agtactcaaatcgcgttca

SEQ ID NO: 26496 - DNA, 26 bp, Gossypium hirsutum
gtgaaaaactgttatgtgctctcctt

SEQ ID NO: 26497 - DNA, 25 bp, Gossypium hirsutum
gatcacttgatttgttgcacaagct

SEQ ID NO: 26498 - DNA, 21 bp, Gossypium hirsutum
ttcaaattttgacatatcatc

SEQ ID NO: 26499 - DNA, 18 bp, Gossypium hirsutum
aaattttgacaaatcatc

SEQ ID NO: 26500 - DNA, 25 bp, Gossypium hirsutum
cctgcttactaagctgacaaacttc

SEQ ID NO: 26501 - DNA, 17 bp, Gossypium hirsutum
gcgtccccagctatgca

SEQ ID NO: 26502 - DNA, 22 bp, Gossypium hirsutum
ctacatgaattaaaaatcaatt

SEQ ID NO: 26503 - DNA, 21 bp, Gossypium hirsutum
ctacatgaattaaaatcaatt

SEQ ID NO: 26504 - DNA, 24 bp, Gossypium hirsutum
tgccgaatttaaggtgttcacatg

SEQ ID NO: 26505 - DNA, 45 bp, Gossypium hirsutum
attcaaatagtaataaatttgatgtcttttgagtaaaattttgag

SEQ ID NO: 26506 - DNA, 17 bp, Gossypium hirsutum
ttcgtctgtaatgtttg

SEQ ID NO: 26507 - DNA, 19 bp, Gossypium hirsutum
ttttcgtctataatgtttg

SEQ ID NO: 26508 - DNA, 37 bp, Gossypium hirsutum
gttggattaaacatctaaacgaaagataatacctttt

SEQ ID NO: 26509 - DNA, 27 bp, Gossypium hirsutum
gctgtaaaagcaaactaatgtcaacca

SEQ ID NO: 26510 - DNA, 21 bp, Gossypium hirsutum
acaacaaattttaggatgttt

SEQ ID NO: 26511 - DNA, 21 bp, Gossypium hirsutum
acaacaaattttagaatgttt

SEQ ID NO: 26512 - DNA, 21 bp, Gossypium hirsutum
tgtgttgggctcatcgagttc

SEQ ID NO: 26513 - DNA, 29 bp, Gossypium hirsutum
cacttggcagttatgtaacttaagaaacg

SEQ ID NO: 26514 - DNA, 23 bp, Gossypium hirsutum
cctaaatttaactagataatttt

SEQ ID NO: 26515 - DNA, 23 bp, Gossypium hirsutum
cctaaatttaactagattatttt

SEQ ID NO: 26516 - DNA, 43 bp, Gossypium hirsutum
gtacattttttaagaatttagtcattttacttttcaagtttca

SEQ ID NO: 26517 - DNA, 29 bp, Gossypium hirsutum
ggcacgttaaatcatcatttcaaacaaaa

SEQ ID NO: 26518 - DNA, 23 bp, Gossypium hirsutum
cccatatttttttattgagcaat

SEQ ID NO: 26519 - DNA, 22 bp, Gossypium hirsutum
cccatattttttattgagcaat

SEQ ID NO: 26520 - DNA, 42 bp, Gossypium hirsutum
tttcattctattctatttctctttctattttcttccctttta

SEQ ID NO: 26521 - DNA, 30 bp, Gossypium hirsutum
tgtattgatatgttggcatgtgtttaaggt

SEQ ID NO: 26522 - DNA, 18 bp, Gossypium hirsutum
catcaaagaggtcaaatt

SEQ ID NO: 26523 - DNA, 18 bp, Gossypium hirsutum
catcaaagagatcaaatt

SEQ ID NO: 26524 - DNA, 25 bp, Gossypium hirsutum
ggtgcctaaccaatatgccttcatt

SEQ ID NO: 26525 - DNA, 25 bp, Gossypium hirsutum
cgaaaactgcaaagccgaactattt

SEQ ID NO: 26526 - DNA, 20 bp, Gossypium hirsutum
cattataaagcattggtttc

SEQ ID NO: 26527 - DNA, 20 bp, Gossypium hirsutum
cattataaagctttggtttc

SEQ ID NO: 26528 - DNA, 20 bp, Gossypium hirsutum
gcaggcatgttgttggaaca

SEQ ID NO: 26529 - DNA, 18 bp, Gossypium hirsutum
cggtcactgcgggtatcg

SEQ ID NO: 26530 - DNA, 18 bp, Gossypium hirsutum
catacatgagaaatgtct

SEQ ID NO: 26531 - DNA, 18 bp, Gossypium hirsutum
catacatgagagatgtct

SEQ ID NO: 26532 - DNA, 30 bp, Gossypium hirsutum
tcttcactatcttcaaagctgtcaagaaat

SEQ ID NO: 26533 - DNA, 26 bp, Gossypium hirsutum
gcaggtaaggctaacaaagaaaagtt

SEQ ID NO: 26534 - DNA, 16 bp, Gossypium hirsutum
ttcgggtcaagtcgag

SEQ ID NO: 26535 - DNA, 14 bp, Gossypium hirsutum
cgggtcaggtcgag

SEQ ID NO: 26536 - DNA, 23 bp, Gossypium hirsutum
tgagttagattcgggtcgagtct

SEQ ID NO: 26537 - DNA, 29 bp, Gossypium hirsutum
ccatgaaaaaaaccgaagttatagcagta

SEQ ID NO: 26538 - DNA, 18 bp, Gossypium hirsutum
tgtacagaagattaaacg

SEQ ID NO: 26539 - DNA, 20 bp, Gossypium hirsutum
tatgtacagaagattagacg

SEQ ID NO: 26540 - DNA, 25 bp, Gossypium hirsutum
gtcaaaagcctaaacttacgaagca

SEQ ID NO: 26541 - DNA, 27 bp, Gossypium hirsutum
caactctcatggttgcatgcataataa

SEQ ID NO: 26542 - DNA, 22 bp, Gossypium hirsutum
tctatagacttttcaaataaaa

SEQ ID NO: 26543 - DNA, 21 bp, Gossypium hirsutum
ctatagacttttcagataaaa

SEQ ID NO: 26544 - DNA, 28 bp, Gossypium hirsutum
gcatttatgctgaggtgaatttgatgaa

SEQ ID NO: 26545 - DNA, 25 bp, Gossypium hirsutum
cttaaagcatcggcaacaacatttg

SEQ ID NO: 26546 - DNA, 17 bp, Gossypium hirsutum
cttttcccgaatggtag

SEQ ID NO: 26547 - DNA, 16 bp, Gossypium hirsutum
ttttcccggatggtag

SEQ ID NO: 26548 - DNA, 30 bp, Gossypium hirsutum
agcagagatggctagaattgttaaaagatt

SEQ ID NO: 26549 - DNA, 44 bp, Gossypium hirsutum
tgatggttgttaatagatatacaagttttataaagtgatttttg

SEQ ID NO: 26550 - DNA, 18 bp, Gossypium hirsutum
caaaccaccatttttcta

SEQ ID NO: 26551 - DNA, 17 bp, Gossypium hirsutum
aaaccaccatatttcta

SEQ ID NO: 26552 - DNA, 25 bp, Gossypium hirsutum
cacttaacctcatagcagcccatat

SEQ ID NO: 26553 - DNA, 26 bp, Gossypium hirsutum
acattgtataagcgtgactgtgaact

SEQ ID NO: 26554 - DNA, 16 bp, Gossypium hirsutum
catgcttgatgaaatt

SEQ ID NO: 26555 - DNA, 15 bp, Gossypium hirsutum
atgcttgataaaatt

SEQ ID NO: 26556 - DNA, 25 bp, Gossypium hirsutum
tcaatcaataacgcgtatggtctgt

SEQ ID NO: 26557 - DNA, 19 bp, Gossypium hirsutum
tgaaaggcggatgcaggaa

SEQ ID NO: 26558 - DNA, 20 bp, Gossypium hirsutum
tcttgaaataatgacaaaac

SEQ ID NO: 26559 - DNA, 19 bp, Gossypium hirsutum
cttgaaataaagacaaaac

SEQ ID NO: 26560 - DNA, 25 bp, Gossypium hirsutum
ccaaaagcctagcattcgaaaatct

SEQ ID NO: 26561 - DNA, 24 bp, Gossypium hirsutum
gtcacccaaaatgaaatccttgca

SEQ ID NO: 26562 - DNA, 15 bp, Gossypium hirsutum
aacgtgtcagaaaag

SEQ ID NO: 26563 - DNA, 13 bp, Gossypium hirsutum
cgtgtcaaaaaag

SEQ ID NO: 26564 - DNA, 27 bp, Gossypium hirsutum
gccattagaaattaaacggttgtgtga

SEQ ID NO: 26565 - DNA, 24 bp, Gossypium hirsutum
gccgacatcgaagaaatcacacta

SEQ ID NO: 26566 - DNA, 15 bp, Gossypium hirsutum
atcagaggcattatc

SEQ ID NO: 26567 - DNA, 17 bp, Gossypium hirsutum
aaatcagagacattatc

SEQ ID NO: 26568 - DNA, 24 bp, Gossypium hirsutum
gaaagtggtaaaattctgcgggtt

SEQ ID NO: 26569 - DNA, 54 bp, Gossypium hirsutum
gtactggacatatatattattatgattacttaaagaatattgtttctaagataa

SEQ ID NO: 26570 - DNA, 23 bp, Gossypium hirsutum
ttgctaaattctaatcacactat

SEQ ID NO: 26571 - DNA, 23 bp, Gossypium hirsutum
ttgctaaattctaataacactat

SEQ ID NO: 26572 - DNA, 20 bp, Gossypium hirsutum
gccttctcaaccacccatca

SEQ ID NO: 26573 - DNA, 32 bp, Gossypium hirsutum
gtttgggttaattgagttattcaaaaatccga

SEQ ID NO: 26574 - DNA, 23 bp, Gossypium hirsutum
ccttttaacttaataagtaaaca

SEQ ID NO: 26575 - DNA, 23 bp, Gossypium hirsutum
ccttttaacttaataactaaaca

SEQ ID NO: 26576 - DNA, 44 bp, Gossypium hirsutum
ggttatttaactagtagacgaagtataaaattatttagctacat

SEQ ID NO: 26577 - DNA, 39 bp, Gossypium hirsutum
aattggtacaaatgaaagagaatatcttagtgttagatt

SEQ ID NO: 26578 - DNA, 17 bp, Gossypium hirsutum
tttgtagacgaatgcac

SEQ ID NO: 26579 - DNA, 17 bp, Gossypium hirsutum
tttgtagacaaatgcac

SEQ ID NO: 26580 - DNA, 32 bp, Gossypium hirsutum
actacacatgcgtactctttccttttattatt

SEQ ID NO: 26581 - DNA, 32 bp, Gossypium hirsutum
cttccggcataaaaatgataaacttcaataga

SEQ ID NO: 26582 - DNA, 19 bp, Gossypium hirsutum
cgactcaattaaataattt

SEQ ID NO: 26583 - DNA, 19 bp, Gossypium hirsutum
cgactcaattaaataaatt

SEQ ID NO: 26584 - DNA, 40 bp, Gossypium hirsutum
tgtgctctaacatcacattagttatattgtaataagattt

SEQ ID NO: 26585 - DNA, 23 bp, Gossypium hirsutum
ccatcgtttcattgcacaagtca

SEQ ID NO: 26586 - DNA, 16 bp, Gossypium hirsutum
ctgttgtgaaacttga

SEQ ID NO: 26587 - DNA, 17 bp, Gossypium hirsutum
cctgttgtgatacttga

SEQ ID NO: 26588 - DNA, 29 bp, Gossypium hirsutum
gagaatcaataagtttgcttgttggacaa

SEQ ID NO: 26589 - DNA, 22 bp, Gossypium hirsutum
ctcgcacgaatgctaagaaacc

SEQ ID NO: 26590 - DNA, 16 bp, Gossypium hirsutum
tggtttccaaactcat

SEQ ID NO: 26591 - DNA, 16 bp, Gossypium hirsutum
tggtttccaagctcat

SEQ ID NO: 26592 - DNA, 24 bp, Gossypium hirsutum
cattccatggcaactcgatctttc

SEQ ID NO: 26593 - DNA, 45 bp, Gossypium hirsutum
agttaagtgacaaaaaagataaaattgaataattaagtgatcatt

SEQ ID NO: 26594 - DNA, 23 bp, Gossypium hirsutum
tcaatctctactattaagtaatg

SEQ ID NO: 26595 - DNA, 21 bp, Gossypium hirsutum
aatctctactattaggtaatg

SEQ ID NO: 26596 - DNA, 29 bp, Gossypium hirsutum
gctaattcaagcaaccaaacaataacatg

SEQ ID NO: 26597 - DNA, 45 bp, Gossypium hirsutum
caacattgataatcaatttaatcattccaaataaaactttctaaa

SEQ ID NO: 26598 - DNA, 16 bp, Gossypium hirsutum
catagtagcaaaattt

SEQ ID NO: 26599 - DNA, 15 bp, Gossypium hirsutum
atagtagcgaaattt

SEQ ID NO: 26600 - DNA, 27 bp, Gossypium hirsutum
ttttgctcaccctacttctgatatgac

SEQ ID NO: 26601 - DNA, 26 bp, Gossypium hirsutum
agcatttgaggcactaaacaaggtat

SEQ ID NO: 26602 - DNA, 17 bp, Gossypium hirsutum
acagttatgagactttc

SEQ ID NO: 26603 - DNA, 16 bp, Gossypium hirsutum
cagttatgaaactttc

SEQ ID NO: 26604 - DNA, 24 bp, Gossypium hirsutum
tggtgacctacacatgtttgttgt

SEQ ID NO: 26605 - DNA, 25 bp, Gossypium hirsutum
tccaatgtttgttgcaccattttgt

SEQ ID NO: 26606 - DNA, 17 bp, Gossypium hirsutum
caacatgacagagcaaa

SEQ ID NO: 26607 - DNA, 17 bp, Gossypium hirsutum
caacatgacaaagcaaa

SEQ ID NO: 26608 - DNA, 25 bp, Gossypium hirsutum
ccactttgaagcaacttggtgtatt

SEQ ID NO: 26609 - DNA, 42 bp, Gossypium hirsutum
caatccttcatttttttttaaatcactgatttttgatactat

SEQ ID NO: 26610 - DNA, 19 bp, Gossypium hirsutum
ctattaggaaaacatttcg

SEQ ID NO: 26611 - DNA, 18 bp, Gossypium hirsutum
tattaggaaaacttttcg

SEQ ID NO: 26612 - DNA, 29 bp, Gossypium hirsutum
cgaaaagaggaggaaatagaaatgggtta

SEQ ID NO: 26613 - DNA, 25 bp, Gossypium hirsutum
gatgatcatgagtagtggcgaagtt

SEQ ID NO: 26614 - DNA, 18 bp, Gossypium hirsutum
catacaacttgattccac

SEQ ID NO: 26615 - DNA, 19 bp, Gossypium hirsutum
acatacaacttaattccac

SEQ ID NO: 26616 - DNA, 44 bp, Gossypium hirsutum
gctctccaaaatgataaaaatttgatttaatcctttaaaattat

SEQ ID NO: 26617 - DNA, 28 bp, Gossypium hirsutum
tcgaattaaccctacacatcttgaactt

SEQ ID NO: 26618 - DNA, 20 bp, Gossypium hirsutum
ctgtcttttcttttcttttt

SEQ ID NO: 26619 - DNA, 19 bp, Gossypium hirsutum
ctgtcttttcttttttttt

SEQ ID NO: 26620 - DNA, 29 bp, Gossypium hirsutum
ccacgaatcacataaacataaaagaagca

SEQ ID NO: 26621 - DNA, 42 bp, Gossypium hirsutum
tctaattggtttatcatattgaaaccagctaattttttaatt

SEQ ID NO: 26622 - DNA, 19 bp, Gossypium hirsutum
tttaatcccttaaaaaaat

SEQ ID NO: 26623 - DNA, 19 bp, Gossypium hirsutum
atttaatcccttaaaaaat

SEQ ID NO: 26624 - DNA, 42 bp, Gossypium hirsutum
ggaaaatgataaaattgtactttgattcttaaaaaaaatcct

SEQ ID NO: 26625 - DNA, 31 bp, Gossypium hirsutum
tcaagaattgagcatataaaccaatgacaga

SEQ ID NO: 26626 - DNA, 15 bp, Gossypium hirsutum
caaaccggaatcaca

SEQ ID NO: 26627 - DNA, 16 bp, Gossypium hirsutum
ccaaaccggtatcaca

SEQ ID NO: 26628 - DNA, 27 bp, Gossypium hirsutum
ggagggatttgagaatcagaatatggt

SEQ ID NO: 26629 - DNA, 25 bp, Gossypium hirsutum
tgttctctcaaaggcattctggaaa

SEQ ID NO: 26630 - DNA, 20 bp, Gossypium hirsutum
cctagatcggccttcagtat

SEQ ID NO: 26631 - DNA, 19 bp, Gossypium hirsutum
ctagatcggcctttagtat

SEQ ID NO: 26632 - DNA, 21 bp, Gossypium hirsutum
ggcagtcaagggacaaaaagg

SEQ ID NO: 26633 - DNA, 21 bp, Gossypium hirsutum
ggagcagcttgtggactttca

SEQ ID NO: 26634 - DNA, 14 bp, Gossypium hirsutum
cgatcgggcggcca

SEQ ID NO: 26635 - DNA, 14 bp, Gossypium hirsutum
cgatcggacggcca

SEQ ID NO: 26636 - DNA, 24 bp, Gossypium hirsutum
ccttgattgcagagtcggttgaat

SEQ ID NO: 26637 - DNA, 23 bp, Gossypium hirsutum
gggtgccagtttctatcatttcg

SEQ ID NO: 26638 - DNA, 16 bp, Gossypium hirsutum
tttctccagaatcgtg

SEQ ID NO: 26639 - DNA, 16 bp, Gossypium hirsutum
tttctccaaaatcgtg

SEQ ID NO: 26640 - DNA, 24 bp, Gossypium hirsutum
cgcgtaccaagagttttctgtaac

SEQ ID NO: 26641 - DNA, 25 bp, Gossypium hirsutum
acaacactcaatcaactcgttcagt

SEQ ID NO: 26642 - DNA, 14 bp, Gossypium hirsutum
caatggcatatttg

SEQ ID NO: 26643 - DNA, 14 bp, Gossypium hirsutum
caatggcgtatttg

SEQ ID NO: 26644 - DNA, 32 bp, Gossypium hirsutum
tgatttatgttattttttagacccaagttggc

SEQ ID NO: 26645 - DNA, 25 bp, Gossypium hirsutum
cctcacaaacacctctctaaaacct

SEQ ID NO: 26646 - DNA, 16 bp, Gossypium hirsutum
aaccaaaggaagattt

SEQ ID NO: 26647 - DNA, 15 bp, Gossypium hirsutum
accaaagggagattt

SEQ ID NO: 26648 - DNA, 25 bp, Gossypium hirsutum
ctcggatacttcgcacaaaatacaa

SEQ ID NO: 26649 - DNA, 45 bp, Gossypium hirsutum
tgtaatgataaaattacactttaacctcccaaaaataataaaaat

SEQ ID NO: 26650 - DNA, 22 bp, Gossypium hirsutum
aattcttaaatggttaaattaa

SEQ ID NO: 26651 - DNA, 26 bp, Gossypium hirsutum
ttataattcttaaatgattaaattaa

SEQ ID NO: 26652 - DNA, 36 bp, Gossypium hirsutum
tcataaaataaataaacaagtgtgaagccagaaaat

SEQ ID NO: 26653 - DNA, 46 bp, Gossypium hirsutum
cgagaaagaagaaaaaaagatagtatagataacaacaatagaataa

SEQ ID NO: 26654 - DNA, 21 bp, Gossypium hirsutum
agttaaaatgaatgaagtttt

SEQ ID NO: 26655 - DNA, 19 bp, Gossypium hirsutum
ttaaaatgaacgaagtttt

SEQ ID NO: 26656 - DNA, 31 bp, Gossypium hirsutum
catgttttcttagtctttcactgagattgag

SEQ ID NO: 26657 - DNA, 31 bp, Gossypium hirsutum
ctgtcttgcattaaaaagcatatgaactaca

SEQ ID NO: 26658 - DNA, 15 bp, Gossypium hirsutum
acagacctgaacttt

SEQ ID NO: 26659 - DNA, 18 bp, Gossypium hirsutum
catacagacctgtacttt

SEQ ID NO: 26660 - DNA, 25 bp, Gossypium hirsutum
gtggaatccctgttttagttggttt

SEQ ID NO: 26661 - DNA, 27 bp, Gossypium hirsutum
tgagatgtgaagagactgatcctcaat

SEQ ID NO: 26662 - DNA, 18 bp, Gossypium hirsutum
cctgtgcattaaatgtaa

SEQ ID NO: 26663 - DNA, 18 bp, Gossypium hirsutum
cctgtgcattagatgtaa

SEQ ID NO: 26664 - DNA, 29 bp, Gossypium hirsutum
ctcgttgtatttactaagctttcacaagc

SEQ ID NO: 26665 - DNA, 30 bp, Gossypium hirsutum
tgaaccgaattaagttgtcttgacttaaga

SEQ ID NO: 26666 - DNA, 19 bp, Gossypium hirsutum
ctgtagaacaaaaacaaat

SEQ ID NO: 26667 - DNA, 19 bp, Gossypium hirsutum
ctgtagaacaaagacaaat

SEQ ID NO: 26668 - DNA, 33 bp, Gossypium hirsutum
gttttctttagttttgcattttattttgctgga

SEQ ID NO: 26669 - DNA, 30 bp, Gossypium hirsutum
tcaaagcttgtaagtactgtactcgatttt

SEQ ID NO: 26670 - DNA, 24 bp, Gossypium hirsutum
ttgtaattttttttatgtattttc

SEQ ID NO: 26671 - DNA, 22 bp, Gossypium hirsutum
tgtaatttttttatgtattttc

SEQ ID NO: 26672 - DNA, 25 bp, Gossypium hirsutum
ctggaaacaaacaaggcaaggaaat

SEQ ID NO: 26673 - DNA, 34 bp, Gossypium hirsutum
gccaatataacctatacatgacattacaaccata

SEQ ID NO: 26674 - DNA, 19 bp, Gossypium hirsutum
atttgacctaagacaaact

SEQ ID NO: 26675 - DNA, 18 bp, Gossypium hirsutum
atttgacctaagcaaact

SEQ ID NO: 26676 - DNA, 37 bp, Gossypium hirsutum
caaaataaatattttgactttgaatttgtggtctcaa

SEQ ID NO: 26677 - DNA, 25 bp, Gossypium hirsutum
ccaagagagacaccaagacatagag

SEQ ID NO: 26678 - DNA, 21 bp, Gossypium hirsutum
caaataaccaagtcatgtatg

SEQ ID NO: 26679 - DNA, 20 bp, Gossypium hirsutum
aaataaccaagtcgtgtatg

SEQ ID NO: 26680 - DNA, 24 bp, Gossypium hirsutum
ctctgttactgccaaacaaaacgt

SEQ ID NO: 26681 - DNA, 31 bp, Gossypium hirsutum
gctttgcacttcaaaaattttgacttgattt

SEQ ID NO: 26682 - DNA, 22 bp, Gossypium hirsutum
ttgaaattatgaagtaatttat

SEQ ID NO: 26683 - DNA, 22 bp, Gossypium hirsutum
ttgaaattatgaagtagtttat

SEQ ID NO: 26684 - DNA, 45 bp, Gossypium hirsutum
ggttatgtacgtaataaaataaactaatagttttgattcaagtaa

SEQ ID NO: 26685 - DNA, 33 bp, Gossypium hirsutum
acatgacactatttgtcttacatgtcatatcaa

SEQ ID NO: 26686 - DNA, 21 bp, Gossypium hirsutum
aaagaaaaaaaaatcaaattt

SEQ ID NO: 26687 - DNA, 20 bp, Gossypium hirsutum
aaagaaaaaaaatcaaattt

SEQ ID NO: 26688 - DNA, 30 bp, Gossypium hirsutum
tgaactgttgaagacaataccattattcct

SEQ ID NO: 26689 - DNA, 33 bp, Gossypium hirsutum
acatatcatactctaaaatctctatcgtgtgga

SEQ ID NO: 26690 - DNA, 21 bp, Gossypium hirsutum
aaagtcagtattaaataaaag

SEQ ID NO: 26691 - DNA, 17 bp, Gossypium hirsutum
tcagtattaaaaaaaag

SEQ ID NO: 26692 - DNA, 30 bp, Gossypium hirsutum
agaaacagtgccttaaagaatacatgaaga

SEQ ID NO: 26693 - DNA, 34 bp, Gossypium hirsutum
cctttaaacatccattaacatctcaatttcatca

SEQ ID NO: 26694 - DNA, 21 bp, Gossypium hirsutum
ataagttcatatggtttttgt

SEQ ID NO: 26695 - DNA, 21 bp, Gossypium hirsutum
ataagttcatatgatttttgt

SEQ ID NO: 26696 - DNA, 27 bp, Gossypium hirsutum
gacttttacagttaggtccaacttggt

SEQ ID NO: 26697 - DNA, 24 bp, Gossypium hirsutum
ggttcattttggacccaatagcaa

SEQ ID NO: 26698 - DNA, 23 bp, Gossypium hirsutum
ttattaggctaatgttagactta

SEQ ID NO: 26699 - DNA, 18 bp, Gossypium hirsutum
aggctaatgttaggctta

SEQ ID NO: 26700 - DNA, 32 bp, Gossypium hirsutum
gtagatattagcctaacatgtcagttttctca

SEQ ID NO: 26701 - DNA, 25 bp, Gossypium hirsutum
caaggtgactttgaacaggttactg

SEQ ID NO: 26702 - DNA, 19 bp, Gossypium hirsutum
atctgtctataagagcttg

SEQ ID NO: 26703 - DNA, 19 bp, Gossypium hirsutum
atctgtctataggagcttg

SEQ ID NO: 26704 - DNA, 25 bp, Gossypium hirsutum
gcctagtggtagtctggtatagcaa

SEQ ID NO: 26705 - DNA, 25 bp, Gossypium hirsutum
aggcccatccaaaaaatgagagaat

SEQ ID NO: 26706 - DNA, 21 bp, Gossypium hirsutum
tcattttttgagtctatattt

SEQ ID NO: 26707 - DNA, 19 bp, Gossypium hirsutum
attttttgagcctatattt

SEQ ID NO: 26708 - DNA, 30 bp, Gossypium hirsutum
ccatttgagaaaatgagcctttttttttgt

SEQ ID NO: 26709 - DNA, 46 bp, Gossypium hirsutum
acgtatttaaaatgtatttttaacttagtccttagtctctatttat

SEQ ID NO: 26710 - DNA, 22 bp, Gossypium hirsutum
agttaatagttgttcgattgag

SEQ ID NO: 26711 - DNA, 20 bp, Gossypium hirsutum
ttaatagttgttcaattgag

SEQ ID NO: 26712 - DNA, 25 bp, Gossypium hirsutum
gcacttaatcccagcagagttgtat

SEQ ID NO: 26713 - DNA, 22 bp, Gossypium hirsutum
gagacggtaccattgtgttcct

SEQ ID NO: 26714 - DNA, 20 bp, Gossypium hirsutum
aaatacaatccataaattat

SEQ ID NO: 26715 - DNA, 15 bp, Gossypium hirsutum
caatccacaaattat

SEQ ID NO: 26716 - DNA, 40 bp, Gossypium hirsutum
agttaaacaagttaatataaatttcccactatctaaagga

SEQ ID NO: 26717 - DNA, 20 bp, Gossypium hirsutum
ctaggactgcaagccaagct

SEQ ID NO: 26718 - DNA, 18 bp, Gossypium hirsutum
ctgctaataacaacattc

SEQ ID NO: 26719 - DNA, 17 bp, Gossypium hirsutum
tgctaataacaatattc

SEQ ID NO: 26720 - DNA, 25 bp, Gossypium hirsutum
agcactgaatctggaaatgagttga

SEQ ID NO: 26721 - DNA, 32 bp, Gossypium hirsutum
ttttggctcatataatgagaaaattagtccca

SEQ ID NO: 26722 - DNA, 21 bp, Gossypium hirsutum
aactagttcctatacattagc

SEQ ID NO: 26723 - DNA, 21 bp, Gossypium hirsutum
aactagttcctatatattagc

SEQ ID NO: 26724 - DNA, 28 bp, Gossypium hirsutum
gtgacatatgacatgccactagtatctt

SEQ ID NO: 26725 - DNA, 38 bp, Gossypium hirsutum
tcaccaaattcgctaattcaaaaatacttttatattca

SEQ ID NO: 26726 - DNA, 15 bp, Gossypium hirsutum
cactcgtcagattta

SEQ ID NO: 26727 - DNA, 16 bp, Gossypium hirsutum
tcactcgttagattta

SEQ ID NO: 26728 - DNA, 25 bp, Gossypium hirsutum
aacagcctaattttcagtggtgtct

SEQ ID NO: 26729 - DNA, 25 bp, Gossypium hirsutum
aagtcagaccacctagctctcataa

SEQ ID NO: 26730 - DNA, 21 bp, Gossypium hirsutum
catcttcatgattattcccac

SEQ ID NO: 26731 - DNA, 20 bp, Gossypium hirsutum
atcttcatgattatccccac

SEQ ID NO: 26732 - DNA, 24 bp, Gossypium hirsutum
ttggagacaggagaagtggttttc

SEQ ID NO: 26733 - DNA, 25 bp, Gossypium hirsutum
tggattttgacccttccattttgga

SEQ ID NO: 26734 - DNA, 16 bp, Gossypium hirsutum
actttctccgcttctc

SEQ ID NO: 26735 - DNA, 16 bp, Gossypium hirsutum
actttctctgcttctc

SEQ ID NO: 26736 - DNA, 41 bp, Gossypium hirsutum
aaaattttacttagagaaagaaaaaagaaaaagagaggtaa

SEQ ID NO: 26737 - DNA, 27 bp, Gossypium hirsutum
aaagaagaagaaaaatcacgggcaaaa

SEQ ID NO: 26738 - DNA, 24 bp, Gossypium hirsutum
tcttatttattataatgaaatctc

SEQ ID NO: 26739 - DNA, 25 bp, Gossypium hirsutum
ttcttatttattataataaaatctc

SEQ ID NO: 26740 - DNA, 27 bp, Gossypium hirsutum
gggctttaggttttcctttaattctcc

SEQ ID NO: 26741 - DNA, 25 bp, Gossypium hirsutum
cggcatgaaaagaatcccgaaatag

SEQ ID NO: 26742 - DNA, 16 bp, Gossypium hirsutum
tcattcaacggatttc

SEQ ID NO: 26743 - DNA, 15 bp, Gossypium hirsutum
cattcaacagatttc

SEQ ID NO: 26744 - DNA, 41 bp, Gossypium hirsutum
ttttatttttaaattaaagaaatctgttttgggattttccc

SEQ ID NO: 26745 - DNA, 27 bp, Gossypium hirsutum
ctcttcccaaaaaatcaatggatgtgt

SEQ ID NO: 26746 - DNA, 16 bp, Gossypium hirsutum
cttcgtgatgatcttg

SEQ ID NO: 26747 - DNA, 17 bp, Gossypium hirsutum
ccttcgtgattatcttg

SEQ ID NO: 26748 - DNA, 20 bp, Gossypium hirsutum
cccgatggaagccaaactca

SEQ ID NO: 26749 - DNA, 24 bp, Gossypium hirsutum
aatggcagctttgctatcacagta

SEQ ID NO: 26750 - DNA, 16 bp, Gossypium hirsutum
ttcaccactgaagttg

SEQ ID NO: 26751 - DNA, 17 bp, Gossypium hirsutum
cttcaccaatgaagttg

SEQ ID NO: 26752 - DNA, 27 bp, Gossypium hirsutum
aattatggaagagctgaggaaaccaat

SEQ ID NO: 26753 - DNA, 27 bp, Gossypium hirsutum
gagatagagacagaaagaaacgggttt

SEQ ID NO: 26754 - DNA, 22 bp, Gossypium hirsutum
aataacgtaatttaaaaaaaaa

SEQ ID NO: 26755 - DNA, 21 bp, Gossypium hirsutum
ataacgtaattttaaaaaaaa

SEQ ID NO: 26756 - DNA, 27 bp, Gossypium hirsutum
tccgtttagctaataattggcaggatt

SEQ ID NO: 26757 - DNA, 28 bp, Gossypium hirsutum
tgaaattgacccactatttttgcaacag

SEQ ID NO: 26758 - DNA, 23 bp, Gossypium hirsutum
taaaaaatgttaaaggattttat

SEQ ID NO: 26759 - DNA, 20 bp, Gossypium hirsutum
aaaatgttagaggattttat

SEQ ID NO: 26760 - DNA, 25 bp, Gossypium hirsutum
gctatcactcaaccttctccatgtt

SEQ ID NO: 26761 - DNA, 25 bp, Gossypium hirsutum
tcgaaccaagtctcattgatgcttt

SEQ ID NO: 26762 - DNA, 16 bp, Gossypium hirsutum
ccccttcgaaggcaga

SEQ ID NO: 26763 - DNA, 16 bp, Gossypium hirsutum
ccccttcgatggcaga

SEQ ID NO: 26764 - DNA, 25 bp, Gossypium hirsutum
tgatgagggattgtccaaaaaggtt

SEQ ID NO: 26765 - DNA, 29 bp, Gossypium hirsutum
aggtaatatggctgactctcttactgatt

SEQ ID NO: 26766 - DNA, 21 bp, Gossypium hirsutum
cattctttgacatgtgaggta

SEQ ID NO: 26767 - DNA, 23 bp, Gossypium hirsutum
ttcattctttgacatatgaggta

SEQ ID NO: 26768 - DNA, 29 bp, Gossypium hirsutum
tgcaagtacctaaaaaaccatagacaaga

SEQ ID NO: 26769 - DNA, 19 bp, Gossypium hirsutum
acgcgcgaggaaggattag

SEQ ID NO: 26770 - DNA, 14 bp, Gossypium hirsutum
accctcgtaacgcc

SEQ ID NO: 26771 - DNA, 14 bp, Gossypium hirsutum
acccttgtaacgcc

SEQ ID NO: 26772 - DNA, 33 bp, Gossypium hirsutum
aatctcaatatccaattctagttatccaaacgt

SEQ ID NO: 26773 - DNA, 24 bp, Gossypium hirsutum
cttaccctgatacttcccctgttg

SEQ ID NO: 26774 - DNA, 13 bp, Gossypium hirsutum
cctgaagaaatcg

SEQ ID NO: 26775 - DNA, 14 bp, Gossypium hirsutum
acctgaagagatcg

SEQ ID NO: 26776 - DNA, 24 bp, Gossypium hirsutum
cagggtcacattgtagtcgcttat

SEQ ID NO: 26777 - DNA, 25 bp, Gossypium hirsutum
tccgccttttgttttcgttactact

SEQ ID NO: 26778 - DNA, 19 bp, Gossypium hirsutum
ttctcaaccatctttcatc

SEQ ID NO: 26779 - DNA, 19 bp, Gossypium hirsutum
ttctcaaccatttttcatc

SEQ ID NO: 26780 - DNA, 34 bp, Gossypium hirsutum
gtaatggtagatagacgaaagcttaaataaagga

SEQ ID NO: 26781 - DNA, 30 bp, Gossypium hirsutum
gctggttaatcttttctaaggttagttcct

SEQ ID NO: 26782 - DNA, 20 bp, Gossypium hirsutum
ccttcatattcaagtaaatc

SEQ ID NO: 26783 - DNA, 19 bp, Gossypium hirsutum
cttcatattcatgtaaatc

SEQ ID NO: 26784 - DNA, 22 bp, Gossypium hirsutum
gctaagctctcaactcggcaaa

SEQ ID NO: 26785 - DNA, 37 bp, Gossypium hirsutum
gattctgaaaacaattaaaaacaatacctacctacaa

SEQ ID NO: 26786 - DNA, 21 bp, Gossypium hirsutum
tatttttttttcagaattttt

SEQ ID NO: 26787 - DNA, 21 bp, Gossypium hirsutum
tatttttttttcaaaattttt

SEQ ID NO: 26788 - DNA, 25 bp, Gossypium hirsutum
ggcctgggattggttttagtagttt

SEQ ID NO: 26789 - DNA, 27 bp, Gossypium hirsutum
aggcttagcacttacttggtgattaag

SEQ ID NO: 26790 - DNA, 20 bp, Gossypium hirsutum
tcaaattctagggctaatag

SEQ ID NO: 26791 - DNA, 21 bp, Gossypium hirsutum
atcaaattctagagctaatag

SEQ ID NO: 26792 - DNA, 31 bp, Gossypium hirsutum
tttcagtcatgccataaccctattaacatat

SEQ ID NO: 26793 - DNA, 17 bp, Gossypium hirsutum
cgtggcggtcggaatca

SEQ ID NO: 26794 - DNA, 14 bp, Gossypium hirsutum
cgcccatgtggcac

SEQ ID NO: 26795 - DNA, 14 bp, Gossypium hirsutum
cgcccatatggcac

SEQ ID NO: 26796 - DNA, 20 bp, Gossypium hirsutum
cacaacccccatcagaagct

SEQ ID NO: 26797 - DNA, 31 bp, Gossypium hirsutum
cagatgtagctactcaaataagtttcccata

SEQ ID NO: 26798 - DNA, 21 bp, Gossypium hirsutum
cgaaaagtcaaatatttaaaa

SEQ ID NO: 26799 - DNA, 21 bp, Gossypium hirsutum
cgaaaagtcaaatattaaaaa

SEQ ID NO: 26800 - DNA, 30 bp, Gossypium hirsutum
tcttttagtgaaacacatgcgaaaattgat

SEQ ID NO: 26801 - DNA, 43 bp, Gossypium hirsutum
gttgatggctaaatttattagatttctctagaattaagactaa

SEQ ID NO: 26802 - DNA, 14 bp, Gossypium hirsutum
aaaggcaaattttt

SEQ ID NO: 26803 - DNA, 14 bp, Gossypium hirsutum
aaaggcaatttttt

SEQ ID NO: 26804 - DNA, 25 bp, Gossypium hirsutum
ttgacgtggcctttttattggtcta

SEQ ID NO: 26805 - DNA, 43 bp, Gossypium hirsutum
acacgaggttctgatatcaattaaagtttaataatttatttag

SEQ ID NO: 26806 - DNA, 20 bp, Gossypium hirsutum
tccttgaactatgtagtttt

SEQ ID NO: 26807 - DNA, 20 bp, Gossypium hirsutum
tccttgaactatctagtttt

SEQ ID NO: 26808 - DNA, 32 bp, Gossypium hirsutum
agaagtccttgaatatctacccaaaaagaaac

SEQ ID NO: 26809 - DNA, 34 bp, Gossypium hirsutum
atttaactactaatgtctgtgccaagattagaat

SEQ ID NO: 26810 - DNA, 25 bp, Gossypium hirsutum
tcaattttaattactttacttttag

SEQ ID NO: 26811 - DNA, 23 bp, Gossypium hirsutum
aattttaattactgtacttttag

SEQ ID NO: 26812 - DNA, 45 bp, Gossypium hirsutum
gtccctatctttaatctaatcaattttattttatgtactttttga

SEQ ID NO: 26813 - DNA, 27 bp, Gossypium hirsutum
tttccggtctcatatgatgcctataga

SEQ ID NO: 26814 - DNA, 15 bp, Gossypium hirsutum
ccctcaaatggcccc

SEQ ID NO: 26815 - DNA, 14 bp, Gossypium hirsutum
cctcaagtggcccc

SEQ ID NO: 26816 - DNA, 21 bp, Gossypium hirsutum
ggaccacacaggctaggtttt

SEQ ID NO: 26817 - DNA, 35 bp, Gossypium hirsutum
gtttgtaggatgtcgagtttcttaatatttgaatt

SEQ ID NO: 26818 - DNA, 17 bp, Gossypium hirsutum
ctcaccagtgatatgtg

SEQ ID NO: 26819 - DNA, 16 bp, Gossypium hirsutum
tcaccagtcatatgtg

SEQ ID NO: 26820 - DNA, 32 bp, Gossypium hirsutum
agtcgcaagaattgtctatttatgatatgtgt

SEQ ID NO: 26821 - DNA, 25 bp, Gossypium hirsutum
tgaaagagcactcatgcatggtaat

SEQ ID NO: 26822 - DNA, 24 bp, Gossypium hirsutum
aaagaaacaaattataatatttca

SEQ ID NO: 26823 - DNA, 23 bp, Gossypium hirsutum
aagaaacaaattataatctttca

SEQ ID NO: 26824 - DNA, 26 bp, Gossypium hirsutum
tgttagcaccacaaagaatctcaact

SEQ ID NO: 26825 - DNA, 22 bp, Gossypium hirsutum
gtcgccaaaagccttgcataaa

SEQ ID NO: 26826 - DNA, 23 bp, Gossypium hirsutum
ctcaaaagtacatttaagcctaa

SEQ ID NO: 26827 - DNA, 20 bp, Gossypium hirsutum
aaaagtacatttgagcctaa

SEQ ID NO: 26828 - DNA, 25 bp, Gossypium hirsutum
gaagatgctgcaacaatggaaagaa

SEQ ID NO: 26829 - DNA, 47 bp, Gossypium hirsutum
aaaccttattctaaaataaaataaaagaagtctagttctatatggat

SEQ ID NO: 26830 - DNA, 18 bp, Gossypium hirsutum
aatttgggtcacttaatt

SEQ ID NO: 26831 - DNA, 18 bp, Gossypium hirsutum
aatttgggtctcttaatt

SEQ ID NO: 26832 - DNA, 26 bp, Gossypium hirsutum
tgagaatttgtgtcaaggtggagatt

SEQ ID NO: 26833 - DNA, 24 bp, Gossypium hirsutum
gacaactgactgtatccactggta

SEQ ID NO: 26834 - DNA, 15 bp, Gossypium hirsutum
acctggatggacctc

SEQ ID NO: 26835 - DNA, 20 bp, Gossypium hirsutum
aatatacctagatggacctc

SEQ ID NO: 26836 - DNA, 25 bp, Gossypium hirsutum
cccgtagtgctcacaattcagaata

SEQ ID NO: 26837 - DNA, 23 bp, Gossypium hirsutum
gtcacacacggtcaaaacacatg

SEQ ID NO: 26838 - DNA, 21 bp, Gossypium hirsutum
tttcgtccatattggtagaca

SEQ ID NO: 26839 - DNA, 22 bp, Gossypium hirsutum
atttcgtccatattagtagaca

SEQ ID NO: 26840 - DNA, 29 bp, Gossypium hirsutum
gcaaatttgggtaagaaataaagctagga

SEQ ID NO: 26841 - DNA, 45 bp, Gossypium hirsutum
cccttttcaatttaattctattaaaatttcattttcataacactt

SEQ ID NO: 26842 - DNA, 20 bp, Gossypium hirsutum
caaatttaaactaaaaaaag

SEQ ID NO: 26843 - DNA, 19 bp, Gossypium hirsutum
caaatttaaactaaaaaag

SEQ ID NO: 26844 - DNA, 39 bp, Gossypium hirsutum
cgtaggatgaaaaatattactaacaaaataacaagagta

SEQ ID NO: 26845 - DNA, 20 bp, Gossypium hirsutum
ggcatctggttcacaagcaa

SEQ ID NO: 26846 - DNA, 16 bp, Gossypium hirsutum
taaagatgcaaaccgc

SEQ ID NO: 26847 - DNA, 14 bp, Gossypium hirsutum
aagatgcgaaccgc

SEQ ID NO: 26848 - DNA, 24 bp, Gossypium hirsutum
tcctttgtacttttcccagatgca

SEQ ID NO: 26849 - DNA, 29 bp, Gossypium hirsutum
tgaatcgcatattcaagtttcatttctcg

SEQ ID NO: 26850 - DNA, 23 bp, Gossypium hirsutum
tcaataagtcttctcctataata

SEQ ID NO: 26851 - DNA, 23 bp, Gossypium hirsutum
tcaataagtcttcttctataata

SEQ ID NO: 26852 - DNA, 25 bp, Gossypium hirsutum
ccaatgcacggtgaagcaaattatt

SEQ ID NO: 26853 - DNA, 22 bp, Gossypium hirsutum
ccagaacgtgaacgtctaacga

SEQ ID NO: 26854 - DNA, 14 bp, Gossypium hirsutum
aatgcggaattgtg

SEQ ID NO: 26855 - DNA, 15 bp, Gossypium hirsutum
aaatgcagaattgtg

SEQ ID NO: 26856 - DNA, 28 bp, Gossypium hirsutum
aactagaaagaccattgatgtgggaaaa

SEQ ID NO: 26857 - DNA, 28 bp, Gossypium hirsutum
gctcagactactctggtattagaaatgg

SEQ ID NO: 26858 - DNA, 17 bp, Gossypium hirsutum
atttcagcgaggtgaag

SEQ ID NO: 26859 - DNA, 17 bp, Gossypium hirsutum
atttcagcaaggtgaag

SEQ ID NO: 26860 - DNA, 28 bp, Gossypium hirsutum
cccatctttaaccagtttgatgaacaaa

SEQ ID NO: 26861 - DNA, 29 bp, Gossypium hirsutum
agcaaaggcttgaaggagataaataatca

SEQ ID NO: 26862 - DNA, 17 bp, Gossypium hirsutum
ctcctccatgtaacgat

SEQ ID NO: 26863 - DNA, 18 bp, Gossypium hirsutum
tctcctccatttaacgat

SEQ ID NO: 26864 - DNA, 25 bp, Gossypium hirsutum
cgtgtgtgctttaacttgactgaat

SEQ ID NO: 26865 - DNA, 30 bp, Gossypium hirsutum
gcaaagctagaaatttttttaagagaccga

SEQ ID NO: 26866 - DNA, 25 bp, Gossypium hirsutum
agatcatttaaaattttaaattaat

SEQ ID NO: 26867 - DNA, 23 bp, Gossypium hirsutum
atcatttaaaattctaaattaat

SEQ ID NO: 26868 - DNA, 26 bp, Gossypium hirsutum
gctatgggagattgttaaggtctcaa

SEQ ID NO: 26869 - DNA, 23 bp, Gossypium hirsutum
gcttgggttgcaccactttattt

SEQ ID NO: 26870 - DNA, 21 bp, Gossypium hirsutum
attcatgtatgagatactatg

SEQ ID NO: 26871 - DNA, 19 bp, Gossypium hirsutum
tcatgtatgagatgctatg

SEQ ID NO: 26872 - DNA, 39 bp, Gossypium hirsutum
aattttaacatatttaaaatttggcatgctttagacatc

SEQ ID NO: 26873 - DNA, 25 bp, Gossypium hirsutum
actgtattagcacccaacgatgaag

SEQ ID NO: 26874 - DNA, 20 bp, Gossypium hirsutum
aattgatcagtggttaactt

SEQ ID NO: 26875 - DNA, 19 bp, Gossypium hirsutum
attgatcagtgattaactt

SEQ ID NO: 26876 - DNA, 16 bp, Gossypium hirsutum
tgcaccgggttcgctt

SEQ ID NO: 26877 - DNA, 21 bp, Gossypium hirsutum
ggcaaaagccattggaatcga

SEQ ID NO: 26878 - DNA, 16 bp, Gossypium hirsutum
ttcaggaccactcttt

SEQ ID NO: 26879 - DNA, 16 bp, Gossypium hirsutum
ttcaggacaactcttt

SEQ ID NO: 26880 - DNA, 22 bp, Gossypium hirsutum
gacgacccacgtttgattttcc

SEQ ID NO: 26881 - DNA, 24 bp, Gossypium hirsutum
cggtgtcgttttaagccgtaagat

SEQ ID NO: 26882 - DNA, 15 bp, Gossypium hirsutum
ccgcttcaatgccaa

SEQ ID NO: 26883 - DNA, 15 bp, Gossypium hirsutum
ccgcttcaacgccaa

SEQ ID NO: 26884 - DNA, 18 bp, Gossypium hirsutum
caggccgtgccatgaaac

SEQ ID NO: 26885 - DNA, 28 bp, Gossypium hirsutum
ttggtaaagttttttaacaaggcagctt

SEQ ID NO: 26886 - DNA, 19 bp, Gossypium hirsutum
aaacctaatgatggaaaag

SEQ ID NO: 26887 - DNA, 16 bp, Gossypium hirsutum
cctaatgaaggaaaag

SEQ ID NO: 26888 - DNA, 28 bp, Gossypium hirsutum
ctcccccttagatgtccattaatgaaaa

SEQ ID NO: 26889 - DNA, 23 bp, Gossypium hirsutum
gcatctgtccttttgcttcacaa

SEQ ID NO: 26890 - DNA, 18 bp, Gossypium hirsutum
cactctccatcacccact

SEQ ID NO: 26891 - DNA, 17 bp, Gossypium hirsutum
cactctccatcaccact

SEQ ID NO: 26892 - DNA, 25 bp, Gossypium hirsutum
gctggaattagaaaggcagagaaga

SEQ ID NO: 26893 - DNA, 25 bp, Gossypium hirsutum
gcaatgagcagaacatgtagaccaa

SEQ ID NO: 26894 - DNA, 18 bp, Gossypium hirsutum
cttttgcatcaacatatg

SEQ ID NO: 26895 - DNA, 18 bp, Gossypium hirsutum
cttttgcatcatcatatg

SEQ ID NO: 26896 - DNA, 26 bp, Gossypium hirsutum
acaaacaatgaagcagctatcaaagc

SEQ ID NO: 26897 - DNA, 25 bp, Gossypium hirsutum
acgctcaagtcacactatctcaatt

SEQ ID NO: 26898 - DNA, 15 bp, Gossypium hirsutum
tttcggtaaattttg

SEQ ID NO: 26899 - DNA, 14 bp, Gossypium hirsutum
ttcggtagattttg

SEQ ID NO: 26900 - DNA, 28 bp, Gossypium hirsutum
agctccaatacatgccatataaaccatt

SEQ ID NO: 26901 - DNA, 39 bp, Gossypium hirsutum
tgtaatatgaaataagatatttgactctgttagtaggga

SEQ ID NO: 26902 - DNA, 25 bp, Gossypium hirsutum
ctaaaatgtaaaacttacagttgat

SEQ ID NO: 26903 - DNA, 21 bp, Gossypium hirsutum
aatgtaaaacttacggttgat

SEQ ID NO: 26904 - DNA, 31 bp, Gossypium hirsutum
cacccttagggtatttgcatctatttttttt

SEQ ID NO: 26905 - DNA, 33 bp, Gossypium hirsutum
gatacagtttaaaaagtttgaggtataactcgg

SEQ ID NO: 26906 - DNA, 26 bp, Gossypium hirsutum
ttgttaattaaaaaaataaaataaag

SEQ ID NO: 26907 - DNA, 24 bp, Gossypium hirsutum
tgttaattaaaaaataaaataaag

SEQ ID NO: 26908 - DNA, 28 bp, Gossypium hirsutum
acgggaccaaatgtctaataaaagaagt

SEQ ID NO: 26909 - DNA, 28 bp, Gossypium hirsutum
gtgcctagaattatggatccaacaaaga

SEQ ID NO: 26910 - DNA, 19 bp, Gossypium hirsutum
accgaatcaagtttaaatt

SEQ ID NO: 26911 - DNA, 19 bp, Gossypium hirsutum
accgaatcaattttaaatt

SEQ ID NO: 26912 - DNA, 27 bp, Gossypium hirsutum
aaatcctccaaacaatatcgactccaa

SEQ ID NO: 26913 - DNA, 25 bp, Gossypium hirsutum
ttcacaatcagtggcaagtctaagt

SEQ ID NO: 26914 - DNA, 16 bp, Gossypium hirsutum
cacgagtactgaaact

SEQ ID NO: 26915 - DNA, 16 bp, Gossypium hirsutum
cacgagttctgaaact

SEQ ID NO: 26916 - DNA, 24 bp, Gossypium hirsutum
cgcttgcatttatgcaccattcat

SEQ ID NO: 26917 - DNA, 32 bp, Gossypium hirsutum
cacgtcaaaatgcaagtactatgactataaaa

SEQ ID NO: 26918 - DNA, 15 bp, Gossypium hirsutum
ttgtgccaggcacca

SEQ ID NO: 26919 - DNA, 15 bp, Gossypium hirsutum
ttgtgccaagcacca

SEQ ID NO: 26920 - DNA, 24 bp, Gossypium hirsutum
tttggcttcctgttcaatgttgtg

SEQ ID NO: 26921 - DNA, 25 bp, Gossypium hirsutum
atgggatgtgacacagatcatcaag

SEQ ID NO: 26922 - DNA, 20 bp, Gossypium hirsutum
ccatttgataatagataaat

SEQ ID NO: 26923 - DNA, 20 bp, Gossypium hirsutum
ccatttgataataaataaat

SEQ ID NO: 26924 - DNA, 29 bp, Gossypium hirsutum
gaatcgagagtggtcatgatcaaattttt

SEQ ID NO: 26925 - DNA, 29 bp, Gossypium hirsutum
ctccacagatcatatcttgattcaaacct

SEQ ID NO: 26926 - DNA, 19 bp, Gossypium hirsutum
catattgatgataaaatgc

SEQ ID NO: 26927 - DNA, 16 bp, Gossypium hirsutum
attgatgatgaaatgc

SEQ ID NO: 26928 - DNA, 22 bp, Gossypium hirsutum
tggacaacttgggctttcttgt

SEQ ID NO: 26929 - DNA, 43 bp, Gossypium hirsutum
accatgtaactgataaatctcttatactatactaatttcactt

SEQ ID NO: 26930 - DNA, 14 bp, Gossypium hirsutum
tctgtggcatgttc

SEQ ID NO: 26931 - DNA, 14 bp, Gossypium hirsutum
tctgtgccatgttc

SEQ ID NO: 26932 - DNA, 26 bp, Gossypium hirsutum
gaatggactacctttatggcatacct

SEQ ID NO: 26933 - DNA, 27 bp, Gossypium hirsutum
cccttcctcatttccttttgtctaact

SEQ ID NO: 26934 - DNA, 17 bp, Gossypium hirsutum
actgtcaggactatcat

SEQ ID NO: 26935 - DNA, 16 bp, Gossypium hirsutum
ctgtcaggcctatcat

SEQ ID NO: 26936 - DNA, 25 bp, Gossypium hirsutum
ggatgctgatgaggatgaaagtgat

SEQ ID NO: 26937 - DNA, 31 bp, Gossypium hirsutum
ggagctccaatagaagttcattacaaatctt

SEQ ID NO: 26938 - DNA, 18 bp, Gossypium hirsutum
ctattggagcagtcatta

SEQ ID NO: 26939 - DNA, 16 bp, Gossypium hirsutum
attggagcggtcatta

SEQ ID NO: 26940 - DNA, 26 bp, Gossypium hirsutum
gatgaagggttgagatctccaattga

SEQ ID NO: 26941 - DNA, 28 bp, Gossypium hirsutum
ccaaacagaagaacttgattccttttca

SEQ ID NO: 26942 - DNA, 14 bp, Gossypium hirsutum
agctgacgatgctt

SEQ ID NO: 26943 - DNA, 16 bp, Gossypium hirsutum
tgagctaacgatgctt

SEQ ID NO: 26944 - DNA, 20 bp, Gossypium hirsutum
gggagctgtccaggaatgaa

SEQ ID NO: 26945 - DNA, 26 bp, Gossypium hirsutum
aaggaaacaaccaagaggaaagatca

SEQ ID NO: 26946 - DNA, 24 bp, Gossypium hirsutum
attatcagtagtaaatggatgaaa

SEQ ID NO: 26947 - DNA, 19 bp, Gossypium hirsutum
cagtagtaagtggatgaaa

SEQ ID NO: 26948 - DNA, 39 bp, Gossypium hirsutum
cgattcaactaaggtatttagaagttataaagatttgtg

SEQ ID NO: 26949 - DNA, 29 bp, Gossypium hirsutum
gtatcgtgccaaaataaatttaagggcta

SEQ ID NO: 26950 - DNA, 20 bp, Gossypium hirsutum
aagatcaaatcagaagaaaa

SEQ ID NO: 26951 - DNA, 23 bp, Gossypium hirsutum
ataaagatcaaatcataagaaaa

SEQ ID NO: 26952 - DNA, 30 bp, Gossypium hirsutum
caaggaattgtttagggcttgaaatattca

SEQ ID NO: 26953 - DNA, 23 bp, Gossypium hirsutum
gttgcagatgccttgagtcaaaa

SEQ ID NO: 26954 - DNA, 19 bp, Gossypium hirsutum
atgaatccacgtatgatgt

SEQ ID NO: 26955 - DNA, 19 bp, Gossypium hirsutum
atgaatccacgtctgatgt

SEQ ID NO: 26956 - DNA, 25 bp, Gossypium hirsutum
caaccaaaatcaaaccgtcacttct

SEQ ID NO: 26957 - DNA, 26 bp, Gossypium hirsutum
gcttgataaaggagcaaagtctttcc

SEQ ID NO: 26958 - DNA, 23 bp, Gossypium hirsutum
ttaagagttaaaatccaaagaat

SEQ ID NO: 26959 - DNA, 21 bp, Gossypium hirsutum
aagagttaaaatcaaaagaat

SEQ ID NO: 26960 - DNA, 37 bp, Gossypium hirsutum
ctttcctctacacgtatgatatgaaatatcagtaatc

SEQ ID NO: 26961 - DNA, 25 bp, Gossypium hirsutum
gcttttgtttggttcttgcctatct

SEQ ID NO: 26962 - DNA, 15 bp, Gossypium hirsutum
tgaggccgatcagaa

SEQ ID NO: 26963 - DNA, 15 bp, Gossypium hirsutum
tgaggccggtcagaa

SEQ ID NO: 26964 - DNA, 25 bp, Gossypium hirsutum
gctagcatcatcatttggctcgtta

SEQ ID NO: 26965 - DNA, 45 bp, Gossypium hirsutum
ctttggtttattatcttcactgtttcatttgtatctattataatt

SEQ ID NO: 26966 - DNA, 19 bp, Gossypium hirsutum
attttctctcaatttcctg

SEQ ID NO: 26967 - DNA, 19 bp, Gossypium hirsutum
attttctctcactttcctg

SEQ ID NO: 26968 - DNA, 30 bp, Gossypium hirsutum
cctttgttagagaacgattacagaagttgt

SEQ ID NO: 26969 - DNA, 35 bp, Gossypium hirsutum
cccattgaattgaaataaaaaatcaatttaaccca

SEQ ID NO: 26970 - DNA, 17 bp, Gossypium hirsutum
ttcagagaccggtaatg

SEQ ID NO: 26971 - DNA, 15 bp, Gossypium hirsutum
cagagaccgctaatg

SEQ ID NO: 26972 - DNA, 33 bp, Gossypium hirsutum
ggtttgaaggtagacaaaaaaataaagatagca

SEQ ID NO: 26973 - DNA, 32 bp, Gossypium hirsutum
ggagatgcaatcaaattaaatccagaaacaaa

SEQ ID NO: 26974 - DNA, 23 bp, Gossypium hirsutum
ataaagagattaagaaggttttt

SEQ ID NO: 26975 - DNA, 20 bp, Gossypium hirsutum
aagagattaagaaagttttt

SEQ ID NO: 26976 - DNA, 27 bp, Gossypium hirsutum
cccaacacttcaaggattagtttctct

SEQ ID NO: 26977 - DNA, 26 bp, Gossypium hirsutum
cgtatgcagacttgaaacgaaaagat

SEQ ID NO: 26978 - DNA, 18 bp, Gossypium hirsutum
acactctatcgccgatct

SEQ ID NO: 26979 - DNA, 20 bp, Gossypium hirsutum
aaacactctatcaccgatct

SEQ ID NO: 26980 - DNA, 26 bp, Gossypium hirsutum
cggccaaattgaagtattttcttcca

SEQ ID NO: 26981 - DNA, 25 bp, Gossypium hirsutum
ggtgtaaagggccataggcaattat

SEQ ID NO: 26982 - DNA, 23 bp, Gossypium hirsutum
aaattctgtctttttactagtcc

SEQ ID NO: 26983 - DNA, 22 bp, Gossypium hirsutum
aattctgtctttttcctagtcc

SEQ ID NO: 26984 - DNA, 25 bp, Gossypium hirsutum
tgttccatcgtaaaccacccataaa

SEQ ID NO: 26985 - DNA, 25 bp, Gossypium hirsutum
acccttctttcctaccacgtacata

SEQ ID NO: 26986 - DNA, 17 bp, Gossypium hirsutum
caaaatccccgtgcacg

SEQ ID NO: 26987 - DNA, 17 bp, Gossypium hirsutum
caaaaaccccgtgcacg

SEQ ID NO: 26988 - DNA, 20 bp, Gossypium hirsutum
gtgcgtacctcctccaagtc

SEQ ID NO: 26989 - DNA, 25 bp, Gossypium hirsutum
ttcaagagagggtcagaagaggaat

SEQ ID NO: 26990 - DNA, 21 bp, Gossypium hirsutum
atttagagtgatgtttctgac

SEQ ID NO: 26991 - DNA, 21 bp, Gossypium hirsutum
atttagagtgatgtctctgac

SEQ ID NO: 26992 - DNA, 25 bp, Gossypium hirsutum
agacgtctgtcattttccaagttga

SEQ ID NO: 26993 - DNA, 25 bp, Gossypium hirsutum
tgccgtttaagagtcattggattga

SEQ ID NO: 26994 - DNA, 14 bp, Gossypium hirsutum
acgccgtcgtttag

SEQ ID NO: 26995 - DNA, 13 bp, Gossypium hirsutum
cgccgtcatttag

SEQ ID NO: 26996 - DNA, 27 bp, Gossypium hirsutum
gggaggttgataggtagtttagggttt

SEQ ID NO: 26997 - DNA, 24 bp, Gossypium hirsutum
accttcaaccttgagaggttttgt

SEQ ID NO: 26998 - DNA, 20 bp, Gossypium hirsutum
tttgtaaagactgaagatta

SEQ ID NO: 26999 - DNA, 20 bp, Gossypium hirsutum
tttgtaaagactcaagatta

SEQ ID NO: 27000 - DNA, 23 bp, Gossypium hirsutum
gccaagaaggaagtggagcttaa

SEQ ID NO: 27001 - DNA, 31 bp, Gossypium hirsutum
ggatactctagataggatgatactgaaacca

SEQ ID NO: 27002 - DNA, 21 bp, Gossypium hirsutum
ttgataagagactaaaactgt

SEQ ID NO: 27003 - DNA, 18 bp, Gossypium hirsutum
ataagagactgaaactgt

SEQ ID NO: 27004 - DNA, 26 bp, Gossypium hirsutum
tgttttcgcagaatcaaagtctagct

SEQ ID NO: 27005 - DNA, 25 bp, Gossypium hirsutum
agttgtctttccgtattacgatccg

SEQ ID NO: 27006 - DNA, 21 bp, Gossypium hirsutum
accatgtaataccacttagaa

SEQ ID NO: 27007 - DNA, 21 bp, Gossypium hirsutum
accatgtaataccatttagaa

SEQ ID NO: 27008 - DNA, 25 bp, Gossypium hirsutum
gcaaatgttgctcattggttgtcta

SEQ ID NO: 27009 - DNA, 32 bp, Gossypium hirsutum
ccagatagcatacataaaccttaagacactaa

SEQ ID NO: 27010 - DNA, 17 bp, Gossypium hirsutum
tgttgcaatgtaaaaca

SEQ ID NO: 27011 - DNA, 19 bp, Gossypium hirsutum
attgttgcaatgtagaaca

SEQ ID NO: 27012 - DNA, 32 bp, Gossypium hirsutum
tgcattattaggatttgaaactttgactacct

SEQ ID NO: 27013 - DNA, 23 bp, Gossypium hirsutum
aagagctcgatgggcctatacta

SEQ ID NO: 27014 - DNA, 19 bp, Gossypium hirsutum
atttggtgcgtttttgaga

SEQ ID NO: 27015 - DNA, 17 bp, Gossypium hirsutum
ttggtgcgtatttgaga

SEQ ID NO: 27016 - DNA, 19 bp, Gossypium hirsutum
ggtcccaacggcatagaca

SEQ ID NO: 27017 - DNA, 24 bp, Gossypium hirsutum
cgcccaaagtccacaatagaagag

SEQ ID NO: 27018 - DNA, 21 bp, Gossypium hirsutum
atcagcttacttcctatcaga

SEQ ID NO: 27019 - DNA, 20 bp, Gossypium hirsutum
tcagcttacttcatatcaga

SEQ ID NO: 27020 - DNA, 28 bp, Gossypium hirsutum
tcctgacatggattttttacagtggatt

SEQ ID NO: 27021 - DNA, 25 bp, Gossypium hirsutum
ggttgggctgaaacttgaatcaaat

SEQ ID NO: 27022 - DNA, 20 bp, Gossypium hirsutum
ttacaaaaatccaagttctg

SEQ ID NO: 27023 - DNA, 16 bp, Gossypium hirsutum
aaaaatccaaattctg

SEQ ID NO: 27024 - DNA, 32 bp, Gossypium hirsutum
ttccaatattgcatccttttaatccaaaaaca

SEQ ID NO: 27025 - DNA, 25 bp, Gossypium hirsutum
ggtgggtcaaatgccttgtatctat

SEQ ID NO: 27026 - DNA, 24 bp, Gossypium hirsutum
ataatagacaaggaataaagatat

SEQ ID NO: 27027 - DNA, 17 bp, Gossypium hirsutum
acaaggaatgaagatat

SEQ ID NO: 27028 - DNA, 24 bp, Gossypium hirsutum
gaatccacccatcatccaagctaa

SEQ ID NO: 27029 - DNA, 50 bp, Gossypium hirsutum
gagataaagattaaaattacctataaactttgatttaatatgtaatgtgt

SEQ ID NO: 27030 - DNA, 17 bp, Gossypium hirsutum
tcatgcacacttttaat

SEQ ID NO: 27031 - DNA, 16 bp, Gossypium hirsutum
catgcacacctttaat

SEQ ID NO: 27032 - DNA, 24 bp, Gossypium hirsutum
ggcctagcaaacgggtctaaatat

SEQ ID NO: 27033 - DNA, 33 bp, Gossypium hirsutum
aacgtaggtatgatatttcagtaaagaaaacca

SEQ ID NO: 27034 - DNA, 21 bp, Gossypium hirsutum
tcttcactgaaatactatacc

SEQ ID NO: 27035 - DNA, 20 bp, Gossypium hirsutum
cttcactgaaataccatacc

SEQ ID NO: 27036 - DNA, 22 bp, Gossypium hirsutum
cggtgccatgatttgcttgaat

SEQ ID NO: 27037 - DNA, 32 bp, Gossypium hirsutum
acagatgatttttaatcaggagtagtttgtgt

SEQ ID NO: 27038 - DNA, 17 bp, Gossypium hirsutum
cgacctgtataagaaat

SEQ ID NO: 27039 - DNA, 15 bp, Gossypium hirsutum
acctgtgtaagaaat

SEQ ID NO: 27040 - DNA, 25 bp, Gossypium hirsutum
ctgtgaacccccaacactaacatat

SEQ ID NO: 27041 - DNA, 25 bp, Gossypium hirsutum
ggttgcccattgtttcattgaagtt

SEQ ID NO: 27042 - DNA, 23 bp, Gossypium hirsutum
aattaattattagccggtacgtc

SEQ ID NO: 27043 - DNA, 23 bp, Gossypium hirsutum
aattaattattagccagtacgtc

SEQ ID NO: 27044 - DNA, 31 bp, Gossypium hirsutum
cttctgcttttatatctgtaaactcctagct

SEQ ID NO: 27045 - DNA, 43 bp, Gossypium hirsutum
gtctattttcaatagaaacaaacaagaacattattctaatctt

SEQ ID NO: 27046 - DNA, 19 bp, Gossypium hirsutum
caatgagataactaatttt

SEQ ID NO: 27047 - DNA, 19 bp, Gossypium hirsutum
caatgagataattaatttt

SEQ ID NO: 27048 - DNA, 24 bp, Gossypium hirsutum
tgacagttccaacccttcttcatt

SEQ ID NO: 27049 - DNA, 25 bp, Gossypium hirsutum
gcccttcgtatgtcgttaacgttat

SEQ ID NO: 27050 - DNA, 17 bp, Gossypium hirsutum
ccccttgtgtttacttt

SEQ ID NO: 27051 - DNA, 16 bp, Gossypium hirsutum
cccttgtgtgtacttt

SEQ ID NO: 27052 - DNA, 23 bp, Gossypium hirsutum
ccttgtgttgagtcgagaaccat

SEQ ID NO: 27053 - DNA, 26 bp, Gossypium hirsutum
agtcttgctagcttaccaaattgaca

SEQ ID NO: 27054 - DNA, 16 bp, Gossypium hirsutum
tcaccttgacgctaat

SEQ ID NO: 27055 - DNA, 16 bp, Gossypium hirsutum
tcaccttgaagctaat

SEQ ID NO: 27056 - DNA, 21 bp, Gossypium hirsutum
aggatttggttcagggtctgc

SEQ ID NO: 27057 - DNA, 24 bp, Gossypium hirsutum
gttcatggactctcacagacaaca

SEQ ID NO: 27058 - DNA, 22 bp, Gossypium hirsutum
cacaacattattttgtcaaaat

SEQ ID NO: 27059 - DNA, 21 bp, Gossypium hirsutum
acaacattattttgttaaaat

SEQ ID NO: 27060 - DNA, 34 bp, Gossypium hirsutum
tcactgacagtattttatttttttctccaaaagg

SEQ ID NO: 27061 - DNA, 25 bp, Gossypium hirsutum
tcagaccaccaacccttctatatgt

SEQ ID NO: 27062 - DNA, 15 bp, Gossypium hirsutum
acgcccaacagttaa

SEQ ID NO: 27063 - DNA, 16 bp, Gossypium hirsutum
aacgcccaatagttaa

SEQ ID NO: 27064 - DNA, 25 bp, Gossypium hirsutum
gtgttttgtggttgttcgttcgata

SEQ ID NO: 27065 - DNA, 25 bp, Gossypium hirsutum
ggttgcattggctgataattgacaa

SEQ ID NO: 27066 - DNA, 16 bp, Gossypium hirsutum
tgccatgtatatcaac

SEQ ID NO: 27067 - DNA, 14 bp, Gossypium hirsutum
ccatggatatcaac

SEQ ID NO: 27068 - DNA, 28 bp, Gossypium hirsutum
gtaaattccatggcctacaaagaacaaa

SEQ ID NO: 27069 - DNA, 25 bp, Gossypium hirsutum
acgacattagtttttcccaggtgat

SEQ ID NO: 27070 - DNA, 17 bp, Gossypium hirsutum
ttgaattgctgaaagat

SEQ ID NO: 27071 - DNA, 18 bp, Gossypium hirsutum
cttgaattgctaaaagat

SEQ ID NO: 27072 - DNA, 32 bp, Gossypium hirsutum
gcataaaaagatctgaacttgagacaatgtag

SEQ ID NO: 27073 - DNA, 41 bp, Gossypium hirsutum
tttcctatttgaaaatcttatttttttaataccctagaagc

SEQ ID NO: 27074 - DNA, 25 bp, Gossypium hirsutum
tttaattttaagttactgagtttta

SEQ ID NO: 27075 - DNA, 21 bp, Gossypium hirsutum
attttaagttactgggtttta

SEQ ID NO: 27076 - DNA, 27 bp, Gossypium hirsutum
cctttggagacatatttatcgcaatgg

SEQ ID NO: 27077 - DNA, 25 bp, Gossypium hirsutum
gcttgttggtcacctttctttgaac

SEQ ID NO: 27078 - DNA, 15 bp, Gossypium hirsutum
aaagggtgggttctg

SEQ ID NO: 27079 - DNA, 14 bp, Gossypium hirsutum
aagggtgggttttg

SEQ ID NO: 27080 - DNA, 25 bp, Gossypium hirsutum
acagctcaatttccccagtttctag

SEQ ID NO: 27081 - DNA, 25 bp, Gossypium hirsutum
cctagatgttccctggttgtcttag

SEQ ID NO: 27082 - DNA, 23 bp, Gossypium hirsutum
agataattttttttaaaaaaaaa

SEQ ID NO: 27083 - DNA, 23 bp, Gossypium hirsutum
agataatttttttttaaaaaaaa

SEQ ID NO: 27084 - DNA, 27 bp, Gossypium hirsutum
ctagtattccactgtaaacgcatcaga

SEQ ID NO: 27085 - DNA, 50 bp, Gossypium hirsutum
cctatatttgaaatttagtctttatacttttaaaatttagtctttacact

SEQ ID NO: 27086 - DNA, 20 bp, Gossypium hirsutum
ctgtatcaacaatggaccta

SEQ ID NO: 27087 - DNA, 19 bp, Gossypium hirsutum
tgtatcaacaatgaaccta

SEQ ID NO: 27088 - DNA, 50 bp, Gossypium hirsutum
gagtatttattattattatttcaaaatatcaaaccagtgagtttaataga

SEQ ID NO: 27089 - DNA, 25 bp, Gossypium hirsutum
gaaagtgcttcatctttggtgcttt

SEQ ID NO: 27090 - DNA, 16 bp, Gossypium hirsutum
acgtccatctaattat

SEQ ID NO: 27091 - DNA, 16 bp, Gossypium hirsutum
acgtccatttaattat

SEQ ID NO: 27092 - DNA, 48 bp, Gossypium hirsutum
agtgtaccctagattcgaattttattataattaattcattaaaaaaag

SEQ ID NO: 27093 - DNA, 23 bp, Gossypium hirsutum
acaggactgtgtgcaatgatgat

SEQ ID NO: 27094 - DNA, 15 bp, Gossypium hirsutum
cagcaatgacaactt

SEQ ID NO: 27095 - DNA, 15 bp, Gossypium hirsutum
cagcaaagacaactt

SEQ ID NO: 27096 - DNA, 32 bp, Gossypium hirsutum
tcccaaccaccaatcaaaatttaataaatcag

SEQ ID NO: 27097 - DNA, 23 bp, Gossypium hirsutum
gccattttttgccctttgcgtaa

SEQ ID NO: 27098 - DNA, 18 bp, Gossypium hirsutum
atctgtcgaaaataacca

SEQ ID NO: 27099 - DNA, 17 bp, Gossypium hirsutum
tctgtcgaaagtaacca

SEQ ID NO: 27100 - DNA, 26 bp, Gossypium hirsutum
gcgaattcggttaaattcttgtcgaa

SEQ ID NO: 27101 - DNA, 35 bp, Gossypium hirsutum
agaaaagtcactctataaagctttgatgtaatctt

SEQ ID NO: 27102 - DNA, 17 bp, Gossypium hirsutum
tttcaaagacagaaaat

SEQ ID NO: 27103 - DNA, 18 bp, Gossypium hirsutum
ttttcaaagaaagaaaat

SEQ ID NO: 27104 - DNA, 30 bp, Gossypium hirsutum
cctattaacaggtctagatgcaacaaatct

SEQ ID NO: 27105 - DNA, 42 bp, Gossypium hirsutum
tcaagaacatttttatcaataaagaatataaatatggcaaca

SEQ ID NO: 27106 - DNA, 21 bp, Gossypium hirsutum
aatttgattgttgaaagagtt

SEQ ID NO: 27107 - DNA, 18 bp, Gossypium hirsutum
ttgattgttggaagagtt

SEQ ID NO: 27108 - DNA, 29 bp, Gossypium hirsutum
tccttattccctcttttcttaacgttcaa

SEQ ID NO: 27109 - DNA, 29 bp, Gossypium hirsutum
cactttgctttatcttaaacagggttgaa

SEQ ID NO: 27110 - DNA, 22 bp, Gossypium hirsutum
caactctaaatatgtgatctac

SEQ ID NO: 27111 - DNA, 19 bp, Gossypium hirsutum
ctctaaatatgggatctac

SEQ ID NO: 27112 - DNA, 35 bp, Gossypium hirsutum
cagacgaaacaaacaaataaaaatgtcttaaagtt

SEQ ID NO: 27113 - DNA, 28 bp, Gossypium hirsutum
acacaacccacattttgcaacattaaat

SEQ ID NO: 27114 - DNA, 18 bp, Gossypium hirsutum
aaattgttcaaaaatagc

SEQ ID NO: 27115 - DNA, 15 bp, Gossypium hirsutum
ttgttcaaaaatggc

SEQ ID NO: 27116 - DNA, 39 bp, Gossypium hirsutum
caagttatcaactaaatattgcaactactgtattcattt

SEQ ID NO: 27117 - DNA, 28 bp, Gossypium hirsutum
tgttcgaatcaaactaatttccgagaca

SEQ ID NO: 27118 - DNA, 15 bp, Gossypium hirsutum
agaactaggaatttc

SEQ ID NO: 27119 - DNA, 16 bp, Gossypium hirsutum
cagaactagaaatttc

SEQ ID NO: 27120 - DNA, 26 bp, Gossypium hirsutum
agtttcggcgatctcatatcatttgt

SEQ ID NO: 27121 - DNA, 46 bp, Gossypium hirsutum
tggaaatacattaaaaaagtttacttaaataacactaagatagttg

SEQ ID NO: 27122 - DNA, 23 bp, Gossypium hirsutum
caacttagcaaataaatatgtct

SEQ ID NO: 27123 - DNA, 23 bp, Gossypium hirsutum
caacttagcaaataaatgtgtct

SEQ ID NO: 27124 - DNA, 29 bp, Gossypium hirsutum
tcttgctgccattatgctattatattgca

SEQ ID NO: 27125 - DNA, 24 bp, Gossypium hirsutum
caacaaacagtgagcagaacaagt

SEQ ID NO: 27126 - DNA, 24 bp, Gossypium hirsutum
cgaagattgataaaatttgattaa

SEQ ID NO: 27127 - DNA, 22 bp, Gossypium hirsutum
aagattgataaaattggattaa

SEQ ID NO: 27128 - DNA, 42 bp, Gossypium hirsutum
agcatgagtatcaattttgatttcttttattagtttgattta

SEQ ID NO: 27129 - DNA, 42 bp, Gossypium hirsutum
tttttatgattagattaattaaattcaagttggttgagtcaa

SEQ ID NO: 27130 - DNA, 22 bp, Gossypium hirsutum
tttaacaaactgaataaattat

SEQ ID NO: 27131 - DNA, 17 bp, Gossypium hirsutum
caaactgaagaaattat

SEQ ID NO: 27132 - DNA, 30 bp, Gossypium hirsutum
gcattattttcatgttgggattttgtctct

SEQ ID NO: 27133 - DNA, 34 bp, Gossypium hirsutum
aggctatacttctggaatgattttatttgatgtt

SEQ ID NO: 27134 - DNA, 18 bp, Gossypium hirsutum
ctgcaactcagtttgttt

SEQ ID NO: 27135 - DNA, 18 bp, Gossypium hirsutum
ctgcaactcattttgttt

SEQ ID NO: 27136 - DNA, 28 bp, Gossypium hirsutum
caaaacgtgaagggattgattatgacaa

SEQ ID NO: 27137 - DNA, 25 bp, Gossypium hirsutum
gatctgaggaaaaaaggcaaaccaa

SEQ ID NO: 27138 - DNA, 16 bp, Gossypium hirsutum
tcatgcagaaaatatt

SEQ ID NO: 27139 - DNA, 15 bp, Gossypium hirsutum
tcatgcagaaatatt

SEQ ID NO: 27140 - DNA, 25 bp, Gossypium hirsutum
ggcgtctttctttttgcatctttga

SEQ ID NO: 27141 - DNA, 25 bp, Gossypium hirsutum
tggcagggaaaagagaaaagttgat

SEQ ID NO: 27142 - DNA, 16 bp, Gossypium hirsutum
tcttcttcgaatctct

SEQ ID NO: 27143 - DNA, 16 bp, Gossypium hirsutum
tcttcttcaaatctct

SEQ ID NO: 27144 - DNA, 25 bp, Gossypium hirsutum
cccactgaagtattcgaacagctat

SEQ ID NO: 27145 - DNA, 25 bp, Gossypium hirsutum
gcatactgtagcagcagagcttatt

SEQ ID NO: 27146 - DNA, 19 bp, Gossypium hirsutum
aacaaagacatccaacaga

SEQ ID NO: 27147 - DNA, 17 bp, Gossypium hirsutum
caaagacatgcaacaga

SEQ ID NO: 27148 - DNA, 26 bp, Gossypium hirsutum
tttctgagttccaaggcttatgttca

SEQ ID NO: 27149 - DNA, 25 bp, Gossypium hirsutum
tctcaatgttgatggccataatggt

SEQ ID NO: 27150 - DNA, 16 bp, Gossypium hirsutum
caacgggtattccaag

SEQ ID NO: 27151 - DNA, 16 bp, Gossypium hirsutum
caacgggttttccaag

SEQ ID NO: 27152 - DNA, 25 bp, Gossypium hirsutum
agcctaattgaaaccagggaatctc

SEQ ID NO: 27153 - DNA, 32 bp, Gossypium hirsutum
acatgtaaaggtgcttttaaatactcttgagt

SEQ ID NO: 27154 - DNA, 19 bp, Gossypium hirsutum
tgatgtgaattgtaaatta

SEQ ID NO: 27155 - DNA, 20 bp, Gossypium hirsutum
ttgatgtgaattgttaatta

SEQ ID NO: 27156 - DNA, 30 bp, Gossypium hirsutum
cccacgtcctactacattaataacaatacc

SEQ ID NO: 27157 - DNA, 25 bp, Gossypium hirsutum
gcctcttccatcactattcagctta

SEQ ID NO: 27158 - DNA, 17 bp, Gossypium hirsutum
cattgcacaaatccaca

SEQ ID NO: 27159 - DNA, 16 bp, Gossypium hirsutum
attgcacaagtccaca

SEQ ID NO: 27160 - DNA, 24 bp, Gossypium hirsutum
gggagtggagaagaagatcatggt

SEQ ID NO: 27161 - DNA, 24 bp, Gossypium hirsutum
accttgtacgctgaattgctactc

SEQ ID NO: 27162 - DNA, 16 bp, Gossypium hirsutum
tgcccaaaattttcat

SEQ ID NO: 27163 - DNA, 17 bp, Gossypium hirsutum
atgcccaaatttttcat

SEQ ID NO: 27164 - DNA, 25 bp, Gossypium hirsutum
agagcacgtgaaaatatggagtcat

SEQ ID NO: 27165 - DNA, 32 bp, Gossypium hirsutum
accaagaacttctaaggaatccataaattgaa

SEQ ID NO: 27166 - DNA, 20 bp, Gossypium hirsutum
agttaagcttctattatttg

SEQ ID NO: 27167 - DNA, 18 bp, Gossypium hirsutum
ttaagcttctgttatttg

SEQ ID NO: 27168 - DNA, 27 bp, Gossypium hirsutum
gtcattttgatgtgaggaagaggagaa

SEQ ID NO: 27169 - DNA, 27 bp, Gossypium hirsutum
ctttgagatccaagggaagagatatgg

SEQ ID NO: 27170 - DNA, 17 bp, Gossypium hirsutum
ctcaaaccccccaaaat

SEQ ID NO: 27171 - DNA, 13 bp, Gossypium hirsutum
aacccccaaaaat

SEQ ID NO: 27172 - DNA, 21 bp, Gossypium hirsutum
caccctttcatccccttgtct

SEQ ID NO: 27173 - DNA, 27 bp, Gossypium hirsutum
tggtaaaagtaactgagccaattgagt

SEQ ID NO: 27174 - DNA, 20 bp, Gossypium hirsutum
ttaatgtggtagaatgtttt

SEQ ID NO: 27175 - DNA, 20 bp, Gossypium hirsutum
ttaatgtggtagactgtttt

SEQ ID NO: 27176 - DNA, 30 bp, Gossypium hirsutum
gcttaaaagaaacaaagcataaagccactt

SEQ ID NO: 27177 - DNA, 25 bp, Gossypium hirsutum
gtccaattcgtgactgcaattagtt

SEQ ID NO: 27178 - DNA, 18 bp, Gossypium hirsutum
tgttgatgctattgtttg

SEQ ID NO: 27179 - DNA, 16 bp, Gossypium hirsutum
ttgatgctaatgtttg

SEQ ID NO: 27180 - DNA, 25 bp, Gossypium hirsutum
ggatttcttggcctgcaaatcatta

SEQ ID NO: 27181 - DNA, 31 bp, Gossypium hirsutum
gaagttgcatcaaaaccttcaaaaatctttt

SEQ ID NO: 27182 - DNA, 16 bp, Gossypium hirsutum
tttccacagtgattcc

SEQ ID NO: 27183 - DNA, 16 bp, Gossypium hirsutum
tttccacaatgattcc

SEQ ID NO: 27184 - DNA, 18 bp, Gossypium hirsutum
ggacgtccgcctctacct

SEQ ID NO: 27185 - DNA, 24 bp, Gossypium hirsutum
ctaccaccactattccaacacctt

SEQ ID NO: 27186 - DNA, 15 bp, Gossypium hirsutum
cctttgccgttaacc

SEQ ID NO: 27187 - DNA, 15 bp, Gossypium hirsutum
cctttgcctttaacc

SEQ ID NO: 27188 - DNA, 24 bp, Gossypium hirsutum
caaagtagaggagtgggagtaagg

SEQ ID NO: 27189 - DNA, 31 bp, Gossypium hirsutum
tgaagagcaaatgaaagttgtgttattgttt

SEQ ID NO: 27190 - DNA, 21 bp, Gossypium hirsutum
atctagagttgagttgagttt

SEQ ID NO: 27191 - DNA, 19 bp, Gossypium hirsutum
tctagagttgagtgagttt

SEQ ID NO: 27192 - DNA, 22 bp, Gossypium hirsutum
ggccaaacgaagttaacccaaa

SEQ ID NO: 27193 - DNA, 19 bp, Gossypium hirsutum
cgtgttggccttgcattct

SEQ ID NO: 27194 - DNA, 21 bp, Gossypium hirsutum
atgcatactataatgatggct

SEQ ID NO: 27195 - DNA, 21 bp, Gossypium hirsutum
atgcatactataataatggct

SEQ ID NO: 27196 - DNA, 23 bp, Gossypium hirsutum
tcatcccatcgaagacacacatc

SEQ ID NO: 27197 - DNA, 50 bp, Gossypium hirsutum
caaaaattaatgtatgagacactgatacttttttatgtaatattctataa

SEQ ID NO: 27198 - DNA, 26 bp, Gossypium hirsutum
acattttcttctataaatatcttctt

SEQ ID NO: 27199 - DNA, 24 bp, Gossypium hirsutum
cattttcttctataaatatctttt

SEQ ID NO: 27200 - DNA, 25 bp, Gossypium hirsutum
tgaggccaatcatctcatgaacttt

SEQ ID NO: 27201 - DNA, 30 bp, Gossypium hirsutum
tccttttcacaatttagtccttaagctcat

SEQ ID NO: 27202 - DNA, 21 bp, Gossypium hirsutum
ctagagacttaaaccaaccca

SEQ ID NO: 27203 - DNA, 21 bp, Gossypium hirsutum
ctagagacttaaatcaaccca

SEQ ID NO: 27204 - DNA, 44 bp, Gossypium hirsutum
gggacttatatgtaaaaatgtaaaagttcatgttaaatttatga

SEQ ID NO: 27205 - DNA, 27 bp, Gossypium hirsutum
caagagagaagcagatgagagaaaaca

SEQ ID NO: 27206 - DNA, 22 bp, Gossypium hirsutum
atttgaggaagaaaaacttgta

SEQ ID NO: 27207 - DNA, 20 bp, Gossypium hirsutum
tttgaggaagaaaacttgta

SEQ ID NO: 27208 - DNA, 26 bp, Gossypium hirsutum
gttgtaaccaacaaggcaagaaatga

SEQ ID NO: 27209 - DNA, 23 bp, Gossypium hirsutum
caggtcttccttgcacaaaatcc

SEQ ID NO: 27210 - DNA, 16 bp, Gossypium hirsutum
tgggattgttggaaac

SEQ ID NO: 27211 - DNA, 18 bp, Gossypium hirsutum
actgggattattggaaac

SEQ ID NO: 27212 - DNA, 21 bp, Gossypium hirsutum
aggagcttgtgactgcttcag

SEQ ID NO: 27213 - DNA, 25 bp, Gossypium hirsutum
cgaagagctttagtggattcacaga

SEQ ID NO: 27214 - DNA, 23 bp, Gossypium hirsutum
ttctattcgactactttaacatg

SEQ ID NO: 27215 - DNA, 21 bp, Gossypium hirsutum
ctattcgactactctaacatg

SEQ ID NO: 27216 - DNA, 27 bp, Gossypium hirsutum
tcaagtctgatcatgcacaaactcttt

SEQ ID NO: 27217 - DNA, 27 bp, Gossypium hirsutum
ccctggatttttcattatagcgattgg

SEQ ID NO: 27218 - DNA, 21 bp, Gossypium hirsutum
attaaaccctaagttattctt

SEQ ID NO: 27219 - DNA, 16 bp, Gossypium hirsutum
accctaagctattctt

SEQ ID NO: 27220 - DNA, 33 bp, Gossypium hirsutum
tcttcttcttcttcttcttcttttttaaaccct

SEQ ID NO: 27221 - DNA, 21 bp, Gossypium hirsutum
gagagttacgtggtcgtgctt

SEQ ID NO: 27222 - DNA, 22 bp, Gossypium hirsutum
tctccaatcaactatttcaaaa

SEQ ID NO: 27223 - DNA, 21 bp, Gossypium hirsutum
ctccaatcaactatctcaaaa

SEQ ID NO: 27224 - DNA, 29 bp, Gossypium hirsutum
cgtccaattgatgttttggaagatgaaaa

SEQ ID NO: 27225 - DNA, 29 bp, Gossypium hirsutum
tgtccactttggtccttcctatactttat

SEQ ID NO: 27226 - DNA, 19 bp, Gossypium hirsutum
caaaaattttcgaatccat

SEQ ID NO: 27227 - DNA, 19 bp, Gossypium hirsutum
caaaaattttcaaatccat

SEQ ID NO: 27228 - DNA, 25 bp, Gossypium hirsutum
ggctttatccgctctatttgttgac

SEQ ID NO: 27229 - DNA, 24 bp, Gossypium hirsutum
actagtcaagccacggataaacac

SEQ ID NO: 27230 - DNA, 17 bp, Gossypium hirsutum
atttgcttcttattccc

SEQ ID NO: 27231 - DNA, 15 bp, Gossypium hirsutum
ttgcttcttgttccc

SEQ ID NO: 27232 - DNA, 29 bp, Gossypium hirsutum
tcataaacatgttcgtcaaaacaacaaca

SEQ ID NO: 27233 - DNA, 34 bp, Gossypium hirsutum
tttcacatgaacattctatcatactgtaaacctt

SEQ ID NO: 27234 - DNA, 21 bp, Gossypium hirsutum
atattttaacttcgaattatg

SEQ ID NO: 27235 - DNA, 21 bp, Gossypium hirsutum
atattttaacttcggattatg

SEQ ID NO: 27236 - DNA, 27 bp, Gossypium hirsutum
gggttaatcagaatagtggttttggga

SEQ ID NO: 27237 - DNA, 25 bp, Gossypium hirsutum
cgaaggcagtaattctagagacaga

SEQ ID NO: 27238 - DNA, 15 bp, Gossypium hirsutum
caagtgccaacccct

SEQ ID NO: 27239 - DNA, 15 bp, Gossypium hirsutum
caagtgtcaacccct

SEQ ID NO: 27240 - DNA, 25 bp, Gossypium hirsutum
cacaagtataagcagaggcgaatct

SEQ ID NO: 27241 - DNA, 29 bp, Gossypium hirsutum
agtctttctaacttaggacacaacttcag

SEQ ID NO: 27242 - DNA, 15 bp, Gossypium hirsutum
aatgccttgctttgc

SEQ ID NO: 27243 - DNA, 16 bp, Gossypium hirsutum
caatgccttactttgc

SEQ ID NO: 27244 - DNA, 23 bp, Gossypium hirsutum
agagctttggtggattgattgct

SEQ ID NO: 27245 - DNA, 25 bp, Gossypium hirsutum
gggcatacctactgagtcttacgaa

SEQ ID NO: 27246 - DNA, 17 bp, Gossypium hirsutum
ccgtatgactgtatctg

SEQ ID NO: 27247 - DNA, 16 bp, Gossypium hirsutum
cgtatgacagtatctg

SEQ ID NO: 27248 - DNA, 26 bp, Gossypium hirsutum
tgggatttctttcaaacggaatttcg

SEQ ID NO: 27249 - DNA, 24 bp, Gossypium hirsutum
acgcgggttaagttacacactaag

SEQ ID NO: 27250 - DNA, 18 bp, Gossypium hirsutum
aaacgagtgagctagaag

SEQ ID NO: 27251 - DNA, 18 bp, Gossypium hirsutum
aaacgagtgaactagaag

SEQ ID NO: 27252 - DNA, 24 bp, Gossypium hirsutum
tccggtcctaattcagaagttcac

SEQ ID NO: 27253 - DNA, 44 bp, Gossypium hirsutum
ccatttaataattttggttggattttatatataggattggataa

SEQ ID NO: 27254 - DNA, 21 bp, Gossypium hirsutum
acaagcatataaaaattttga

SEQ ID NO: 27255 - DNA, 19 bp, Gossypium hirsutum
caagcatataaaattttga

SEQ ID NO: 27256 - DNA, 23 bp, Gossypium hirsutum
caccccaacttacccactctttt

SEQ ID NO: 27257 - DNA, 27 bp, Gossypium hirsutum
acgattgaatgtactcaagaagagctg

SEQ ID NO: 27258 - DNA, 16 bp, Gossypium hirsutum
ctagcatcactttcgc

SEQ ID NO: 27259 - DNA, 16 bp, Gossypium hirsutum
ctagcatctctttcgc

SEQ ID NO: 27260 - DNA, 23 bp, Gossypium hirsutum
ctcactgatgccttcctcaagaa

SEQ ID NO: 27261 - DNA, 25 bp, Gossypium hirsutum
cgcatggtcatagggaaatgtattc

SEQ ID NO: 27262 - DNA, 18 bp, Gossypium hirsutum
atatggatcgagttcatt

SEQ ID NO: 27263 - DNA, 18 bp, Gossypium hirsutum
atatggatcgacttcatt

SEQ ID NO: 27264 - DNA, 26 bp, Gossypium hirsutum
ggtttggttctaaagaaagggtacct

SEQ ID NO: 27265 - DNA, 29 bp, Gossypium hirsutum
caaagaaagtgtgaaagagtgaattagca

SEQ ID NO: 27266 - DNA, 20 bp, Gossypium hirsutum
tttcaaaatcacgtcactgc

SEQ ID NO: 27267 - DNA, 19 bp, Gossypium hirsutum
ttcaaaatcacatcactgc

SEQ ID NO: 27268 - DNA, 36 bp, Gossypium hirsutum
tcagtctctgattcaatttatactatttttggtgat

SEQ ID NO: 27269 - DNA, 34 bp, Gossypium hirsutum
catttacccaaaaaattaaataatggcctaccat

SEQ ID NO: 27270 - DNA, 18 bp, Gossypium hirsutum
ttttgacgtaccattcat

SEQ ID NO: 27271 - DNA, 18 bp, Gossypium hirsutum
ttttgacataccattcat

SEQ ID NO: 27272 - DNA, 27 bp, Gossypium hirsutum
cctcccaagaaaatgaaaaggaaatca

SEQ ID NO: 27273 - DNA, 30 bp, Gossypium hirsutum
ggtagcattttgacttgtaatgatcatctc

SEQ ID NO: 27274 - DNA, 18 bp, Gossypium hirsutum
ccatgacatatatcaaac

SEQ ID NO: 27275 - DNA, 17 bp, Gossypium hirsutum
catgacataaatcaaac

SEQ ID NO: 27276 - DNA, 29 bp, Gossypium hirsutum
gctaaggaaatggagaggatattgaatga

SEQ ID NO: 27277 - DNA, 25 bp, Gossypium hirsutum
gggaatgttagatcggaacgtgtat

SEQ ID NO: 27278 - DNA, 19 bp, Gossypium hirsutum
caaataatcagcagcttat

SEQ ID NO: 27279 - DNA, 18 bp, Gossypium hirsutum
aaataatctgcagcttat

SEQ ID NO: 27280 - DNA, 30 bp, Gossypium hirsutum
gtgctcaatgtcttttccttttatacgttt

SEQ ID NO: 27281 - DNA, 25 bp, Gossypium hirsutum
cagaagagacctaaagtgacatgct

SEQ ID NO: 27282 - DNA, 21 bp, Gossypium hirsutum
caagatatcaagatacctagc

SEQ ID NO: 27283 - DNA, 21 bp, Gossypium hirsutum
caagatatcaagttacctagc

SEQ ID NO: 27284 - DNA, 23 bp, Gossypium hirsutum
gtgtcgtgctaaggcctatagac

SEQ ID NO: 27285 - DNA, 27 bp, Gossypium hirsutum
cagaaactcccaatttctcaaagttgt

SEQ ID NO: 27286 - DNA, 15 bp, Gossypium hirsutum
aactgaacaaaatca

SEQ ID NO: 27287 - DNA, 15 bp, Gossypium hirsutum
aactgaacgaaatca

SEQ ID NO: 27288 - DNA, 24 bp, Gossypium hirsutum
tggcatgcagtaaagaggttagag

SEQ ID NO: 27289 - DNA, 49 bp, Gossypium hirsutum
gtaatgtgatatcaacttattatttttatacaaaactctcaaaaaattc

SEQ ID NO: 27290 - DNA, 20 bp, Gossypium hirsutum
ctcgctttttaagttaggac

SEQ ID NO: 27291 - DNA, 18 bp, Gossypium hirsutum
cgctttttgagttaggac

SEQ ID NO: 27292 - DNA, 50 bp, Gossypium hirsutum
gtctcttttttacctaaaaaaatataagttgtaaatttagtttatcttct
